(19) United States
(12) Patent Application Publication
(10) Pub. No.: US 2019/0290686 A1
(43) Pub. Date: Sep. 26, 2019

(54) ARTIFICIAL ANTIGEN PRESENTING CELLS AND METHODS OF USE

(71) Applicant: Rubius Therapeutics, Inc., Cambridge, MA (US)

(72) Inventors: Thomas Joseph Wickham, Groton, MA (US); Tiffany Fen-yi Chen, Cambridge, MA (US); Sivan Elloul, Newton, MA (US); Regina Sophia Salvat, Cambridge, MA (US); Nathan J. Dowden, Winchester, MA (US)

(73) Assignee: Rubius Therapeutics, Inc., Cambridge, MA (US)

(21) Appl. No.: 16/231,489

(22) Filed: Dec. 22, 2018

Related U.S. Application Data
(60) Provisional application No. 62/610,149, filed on Dec. 23, 2017.
(60) Provisional application No. 62/650,250, filed on Mar. 29, 2018.
(60) Provisional application No. 62/665,445, filed on May 1, 2018.
(60) Provisional application No. 62/680,544, filed on Jun. 4, 2018.
(60) Provisional application No. 62/686,656, filed on Jun. 18, 2018.
(60) Provisional application No. 62/688,324, filed on Jun. 21, 2018.
(60) Provisional application No. 62/692,623, filed on Jun. 29, 2018.
(60) Provisional application No. 62/745,253, filed on Oct. 12, 2018.
(60) Provisional application No. 62/757,741, filed on Nov. 8, 2018.

(51) Int. Cl. A61K 35/15; A61K 35/18; A61K 35/19; C12N 5/0783; C12N 5/078

(52) U.S. Cl. CPC A61K 35/15; A61K 35/18; C12N 5/0644; C12N 5/0637; C12N 5/0641; A61K 35/19

(57) ABSTRACT

The present disclosure relates to artificial antigen presenting cells (aAPCs), in particular engineered erythroid cells and enucleated cells (e.g. enucleated erythroid cells and platelets), that are engineered to activate or suppress T cells.

### RELATED APPLICATIONS

[0001] This application claims priority to U.S. Provisional Patent Application No. 62/610,149, filed on Dec. 23, 2017, U.S. Provisional Patent Application No. 62/650,250, filed on Mar. 29, 2018, U.S. Provisional Patent Application No. 62/665,445, filed on May 1, 2018, U.S. Provisional Patent Application No. 62/680,544, filed on Jun. 4, 2018, U.S. Provisional Patent Application No. 62/686,656, filed on Jun. 18, 2018, U.S. Provisional Patent Application No. 62/688,324, filed on Jun. 21, 2018, U.S. Provisional Patent Application No. 62/692,623, filed on Jun. 29, 2018, U.S. Provisional Patent Application No. 62/745,253, filed on Oct. 12, 2018 and U.S. Provisional Patent Application No. 62/757,741, filed on Nov. 8, 2018, the entire contents of each of which are incorporated herein by reference for all purposes.

### SEQUENCE LISTING

[0002] The instant application contains a Sequence Listing which has been submitted electronically in ASCII format and is hereby incorporated by reference in its entirety. Said ASCII copy, created on Dec. 21, 2018, is named 129267-00120_SL.txt and is 588,687 bytes in size.

### BACKGROUND

[0003] Active immune responses depend on efficient presentation of antigens and co-stimulatory signals by antigen-presenting cells (APCs). Upon internalization of an antigen, the APCs can display antigen-class I and II major histocompatibility complex (MHC) on the membrane together with co-stimulatory signals to activate antigen-specific T cells, which play a key role in the adaptive immune response. In vivo, induction of T cell responses is highly dependent on interactions with professional antigen-presenting cells (APCs), in particular dendritic cells (DCs), which present, for example, tumor-specific antigens. Generally, antigen-specific T cells can be primed and amplified ex vivo before they are transferred back to the patient. For example, in adoptive cell transfer (ACT), tumor-specific T cells are isolated then expanded ex vivo to obtain a large number of cells for transfusion. As one of the APCs, dendritic cells (DCs) are usually used to maximize T cell stimulation ex vivo. However, the use of natural APCs, such as DCs, has been met with certain challenges, including lack of knowledge of the optimal antigen-loaded DC, and mixed results have been found in clinical trials (Steenblock E. R. et al., Expert Opin. Biol. Ther. 2009; 9: 451-464; Melief C M J Immunity. 2008; 29: 372-383; Palucka K. and Banchereau J. Immunity. 2013; 39: 38-48). In addition, isolation and ex vivo stimulation of autologous DCs is time-consuming and expensive, and the quality of ex vivo-generated DCs can be variable (Steenblock E. R. et al. 2009; Kim J. V. et al. Nat. Biotechnol. 2004; 22: 403-410). The use of patient-derived autologous DCs therefore limits standardization of DC-based treatment protocols (Steenblock E. R. et al. 2009; Kim J. V. et al. 2004).

[0004] Artificial APCs (aAPCs) are engineered platforms for T cell activation and expansion that aim to avoid the aforementioned obstacles while mimicking the interaction between DCs and T cells. They include multiple systems, including synthetic biomaterials that have been engineered to activate and/or expand desirable immune cell populations (e.g., T cells). These systems may act by mimicking the interaction between DCs and T cells. For instance, several cell-sized, rigid, beads, such as latex microbeads, polystyrene-coated magnetic microbeads and biodegradable poly(lactic-co-glycolic acid) microparticles, have been developed. The efficacy of these beads in inducing activation and/or expansion of immune cells appears to be highly dependent on the properties of the materials used. For example, beads greater than 200 nm are typically retained at the site of inoculation, while smaller particles may be taken up by DCs (see, e.g., Reddy et al. (2006) J. Control. Release 112: 26-34). In contrast, the membrane of natural APCs is much more dynamic than the outer surface of these beads.

[0005] There remains a need to provide improved ways to stimulate T cells and to promulgate sufficient numbers of therapeutic T cells for adoptive immunotherapy. The present invention provides novel and inventive red cell therapeutics (RCTs), specifically aAPCs to mimic the functions of APCs, such as dendritic cells (DCs), to stimulate T cells and induce, for example, antitumor or infectious disease immune responses, or to suppress T cell activity to prevent, for example, autoimmune disorders.

### SUMMARY OF THE INVENTION

[0006] The present disclosure relates to artificial antigen presenting cells (aAPCs), in particular erythroid cells and enucleated cells (e.g. enucleated erythroid cells and platelets), that are engineered to activate or suppress T cells. The engineered erythroid cells can be nucleated, e.g., erythrocyte precursor cells. The engineered erythroid cells can also be enucleated erythroid cells, e.g., reticulocytes or erythrocytes.

[0007] The aAPCs described herein offer numerous advantages over the use of spherical nanoparticles, such as rigid, bead-based aAPCs. As merely one example, the outer surface of a nanoparticle is rigid and immobile, and therefore limits the movement of the polypeptides on its surface, while the outer membrane of an aAPC as described herein (i.e., an erythroid cell or enucleated cell) is dynamic and fluid. An aAPC of the present disclosure therefore allows for greater molecular mobility and more efficient molecular reorganization as compared to nanoparticles, which is highly advantageous for immunological synapse formation and T cell stimulation.

[0008] Accordingly, in one aspect, the disclosure provides an artificial antigen presenting cell (aAPC) engineered to activate T cells, wherein the aAPC comprises an enucleated cell, wherein the enucleated cell comprises on the cell surface at least one exogenous antigenic polypeptide disclosed in Table 1 or Tables 14, 15, and 20-24. In some embodiments, the at least one exogenous antigenic polypeptide is a tumor antigen, an autoimmune disease antigen, a viral antigen, a bacterial antigen or a parasite. In some embodiments, the at least one exogenous antigenic polypeptide is selected from the group consisting of: a melanoma antigen genes-A (MAGE-A) antigen, a neutrophil granule protease antigen, a NY-ESO-1/LAGE-2 antigen, a telomerase antigen, a glycoprotein 100 (gp100) antigen, an epstein barr virus (EBV) antigen, a human papilloma virus (HPV) antigen, and a hepatitis B virus (HBV) antigen.

[0009] In one aspect, the disclosure provides an artificial antigen presenting cell (aAPC) engineered to activate T cells, wherein the aAPC comprises an enucleated cell, wherein the enucleated cell comprises on the cell surface a first exogenous antigenic polypeptide and a second exogenous antigenic polypeptide, and wherein the first exogenous antigenic polypeptide and the second exogenous antigenic polypeptide have amino acid sequences which overlap by at least 2 amino acids. In some embodiments, the overlap is between 2 amino acids and 23 amino acids.

[0010] In some embodiments, the first exogenous antigenic polypeptide, the second exogenous polypeptide, or the first and the second exogenous antigenic polypeptide is a tumor antigen, an autoimmune disease antigen, a viral antigen, a bacterial antigen or a parasite. In some embodiments, the first exogenous antigenic polypeptide, the second exogenous polypeptide, or the first and the second exogenous antigenic polypeptide is a polypeptide disclosed in Table 1 or Tables 14, 15 and 20-24. In some embodiments, the first exogenous antigenic polypeptide, the second exogenous polypeptide, or the first and the second exogenous antigenic polypeptide is selected from the group consisting of: melanoma antigen genes-A (MAGE-A) antigens, neutrophil granule protease antigens, NY-ESO-1/LAGE-2 antigens, telomerase antigens, glycoprotein 100 (gp100) antigens, epstein barr virus (EBV) antigens, human papilloma virus (HPV) antigens, and hepatitis B virus (HBV) antigens.

[0011] In some embodiments, the aAPC further comprises on the cell surface an exogenous antigen-presenting polypeptide. In some embodiments, the exogenous antigen-presenting polypeptide is an MHC class I polypeptide, an MHC class I single chain fusion protein, an MHC class II polypeptide, or an MHC class II single chain fusion protein. In some embodiments, the MHC class I polypeptide is selected from the group consisting of: HLA A, HLA B, and HLA C. In some embodiments, the MHC class II polypeptide is selected from the group consisting of: HLA-DPα, HLA-DPβ, HLA-DM, HLA DOA, HLA DOB, HLA DQα, HLA DQβ, HLA DRα, and HLA DRβ.

[0012] In another aspect, the disclosure provides an artificial antigen presenting cell (aAPC) engineered to activate T cells, wherein the aAPC comprises an enucleated cell, wherein the enucleated cell comprises on the cell surface an exogenous antigen-presenting polypeptide and an exogenous antigenic polypeptide, wherein the exogenous antigen-presenting polypeptide is an MHC class I single chain fusion protein or an MHC class II single chain fusion protein.

[0013] In some embodiments, the MHC class I single chain fusion protein comprises an α-chain, and a β2m chain. In some embodiments, the MHC class I single chain fusion protein further comprises a membrane anchor. In some embodiments, the exogenous antigenic polypeptide is connected to the MHC I single chain fusion protein via a linker. In some embodiments, the linker is a cleavable linker. In some embodiments, the MHC class II single chain fusion protein comprises an α-chain, and a β chain. In some embodiments, the MHC class II single chain fusion protein further comprises a membrane anchor. In some embodiments, the exogenous antigenic polypeptide is connected to the MHC II single chain fusion protein via a linker. In some embodiments, the linker is a cleavable linker. In some embodiments, the anchor comprises a glycophorin A (GPA) protein or a transmembrane domain of small integral membrane protein 1 (SMIM1). In some embodiments, the exogenous antigenic polypeptide is bound to the exogenous antigen-presenting polypeptide covalently. In some embodiments, the exogenous antigenic polypeptide is bound to the exogenous antigen-presenting polypeptide non-covalently.

[0014] In some embodiments, the aAPC further comprising on the cell surface at least one exogenous costimulatory polypeptide. In some embodiments, the at least one exogenous costimulatory polypeptide is selected from the group consisting of 4-1BBL, LIGHT, anti CD28, CD80, CD86, CD70, OX40L, GITRL, TIM4, SLAM, CD48, CD58, CD83, CD155, CD112, IL-15Rα fused to IL-15, IL-21, ICAM-1, a ligand for LFA-1, anti CD3, and a combination thereof. In some embodiments, the aAPC comprises on the cell surface at least two, at least 3, at least 4, or at least 5 exogenous costimulatory polypeptides.

[0015] In some embodiments, the aAPC further comprises on the cell surface an exogenous cytokine polypeptide. In some embodiments, the exogenous cytokine polypeptide is selected from the group consisting of: IL2, IL15, 15Rα fused to IL-15, IL7, IL12, IL18, IL21, IL4, IL6, IL23, IL27, IL17, IL10, TGF-beta, IFN-gamma, IL-1 beta, GM-CSF, and IL-25.

[0016] In some embodiments, the aAPC is capable of activating a T cell that interacts with the aAPC. In some embodiments, activating comprises activation of CD8+ T cells, activation of CD4+ T cells, stimulation of cytotoxic activity of T cells, stimulation of cytokine secretion by T cells, and/or any combination thereof.

[0017] In another aspect, the disclosure provides an artificial antigen presenting cell (aAPC) engineered to suppress T cell activity, wherein the aAPC comprises an enucleated cell, wherein the enucleated cell comprises on the cell surface an exogenous antigen-presenting polypeptide, an exogenous antigenic polypeptide and at least one exogenous co-inhibitory polypeptide disclosed in Table 7.

[0018] In another aspect, the disclosure provides an artificial antigen presenting cell (aAPC) engineered to suppress T cell activity, wherein the aAPC comprises an enucleated cell, wherein the enucleated cell comprises on the cell surface an exogenous antigen-presenting polypeptide, an exogenous antigenic polypeptide disclosed in Table 1 or Tables 16-19, and at least one exogenous co-inhibitory polypeptide.

[0019] In some embodiments, the aAPC further comprises a metabolite-altering polypeptide.

[0020] In another aspect, the disclosure provides an artificial antigen presenting cell (aAPC) engineered to suppress T cell activity, wherein the aAPC comprises an enucleated cell, wherein the enucleated cell comprises on the cell surface an exogenous antigen-presenting polypeptide, an exogenous antigenic polypeptide, and at least one metabolite-altering polypeptide.

[0021] In some embodiments, the aAPC further comprises an exogenous co-inhibitory polypeptide. In some embodiments, the exogenous co-inhibitory polypeptide is IL-35, IL-10, VSIG-3 or a LAG3 agonist. In some embodiments, the metabolite-altering polypeptide is IDO, Arg1, CD39, CD73, TDO, TPH, iNOS, COX2 or PGE synthase.

[0022] In some embodiments, the aAPC is capable of suppressing a T cell that interacts with the aAPC. In some embodiments, the suppressing comprises inhibition of proliferation of a T cell, anergizing of a T cell, or induction of apoptosis of a T cell. In some embodiments, the T cell is a CD4+ T cell or a CD8+ T cell.

[0023] In another aspect, the disclosure provides an artificial antigen presenting cell (aAPC) engineered to activate a regulatory T cell (Treg cell), wherein the aAPC comprises an enucleated cell, wherein the enucleated cell comprises on the cell surface an exogenous antigen-presenting polypeptide and an exogenous antigenic polypeptide.

[0024] In some embodiments, the aAPC further comprises on the cell surface an exogenous Treg expansion polypeptide. In some embodiments, the exogenous Treg expansion polypeptide is CD25-specific IL-2, TNFR2-specific TNF, antiDR3 agonist (VEGI/TL1A specific), 41BBL, TGFβ.

[0025] In some embodiments, the exogenous antigen-presenting polypeptide is an MHC class II polypeptide or an MHC class II single chain fusion protein. In some embodiments, the MHC class II polypeptide is selected from the group consisting of: HLA-DPα, HLA-DPβ, HLA-DM, HLA DOA, HLA DOB, HLA DQα, HLA DQβ, HLA DRα, and HLA DRβ. In some embodiments, the MHC class II single chain fusion protein comprises an α-chain and a β chain. In some embodiments, the MHC class II single chain fusion protein further comprises a membrane anchor. In some embodiments, the exogenous antigenic polypeptide is connected to the MHC class II single chain fusion via a linker. In some embodiments, the linker is a cleavable linker. In some embodiments, the anchor comprises a glycophorin A (GPA) protein or a transmembrane domain of small integral membrane protein 1 (SMIM1). In some embodiments, the exogenous antigenic polypeptide is bound to the exogenous antigen-presenting polypeptide covalently. In some embodiments, the exogenous antigenic polypeptide is bound to the exogenous antigen-presenting polypeptide non-covalently.

[0026] In some embodiments, the exogenous antigenic polypeptide is 8 amino acids in length to 24 amino acids in length.

[0027] In some embodiments, the enucleated cell is an enucleated erythroid cell or a platelet.

[0028] In another aspect, the disclosure provides a method of activating an antigen-specific T cell, the method comprising contacting the T cell with the aAPC of any one of the above aspects, thereby activating the antigen-specific T cell.

[0029] In another aspect, the disclosure provides a method for inducing proliferation of a T cell expressing a receptor molecule, the method comprising contacting the T cell with the aAPC of any one of the above aspects, wherein the costimulatory polypeptide specifically binds with the receptor molecule, thereby inducing proliferation of said T cell.

[0030] In another aspect, the disclosure provides a method of expanding a subset of a T cell population, the method comprising contacting a population of T cells comprising at least one T cell of the subset with an aAPC of any one of the above aspects, wherein the exogenous costimulatory polypeptide comprised on the surface of the aAPC specifically binds with a receptor molecule on the at least one T cell of the subset, and wherein binding of the exogenous costimulatory polypeptide to the receptor molecule induces proliferation of the at least one T cell of the subset, thereby expanding the subset of the T cell population.

[0031] In another aspect, the disclosure provides a method of suppressing activity of a T cell, the method comprising contacting the T cell with the aAPC of any one of the above aspects, thereby suppressing activity of the T cell.

[0032] In another aspect, the disclosure provides a method for activating a Treg cell, the method comprising contacting the Treg cell with the aAPC of any one of the above aspects, thereby activating the Treg cell.

[0033] In another aspect, the disclosure provides a method of treating a subject in need of an altered immune response, the method comprising contacting a T cell of the subject with the aAPC of any one of the above aspects, thereby treating the subject in need of an altered immune response.

[0034] In some embodiments, the contacting is in vitro. In some embodiments, the contacting is in vivo.

[0035] In another aspect, the disclosure provides a method of treating a subject in need of an altered immune response, the method comprising: a) determining an expression profile of an antigen on a cell in the subject, b) selecting an artificial antigen presenting cell (aAPC), wherein the aAPC is an engineered enucleated cell comprising on the cell surface an antigen-presenting polypeptide and at least one first exogenous antigenic polypeptide, and c) administering the aAPC to the subject, thereby treating the subject in need of the altered immune response.

[0036] In another aspect, the disclosure provides a method of treating a subject in need of an altered immune response, the method comprising: a) determining an HLA status of the subject, b) selecting an artificial antigen presenting cell (aAPC) that is immunologically compatible with the subject, wherein the aAPC is an engineered enucleated cell comprising on the cell surface at least one first exogenous antigenic polypeptide and at least one antigen-presenting polypeptide, and c) administering the aAPC to the subject, thereby treating the subject in need of the altered immune response.

[0037] In some embodiments, the subject is in need of an increased immune response. In some embodiments, the subject has cancer or an infectious disease. In some embodiments, the subject is in need of a decreased immune response. In some embodiments, the subject has an autoimmune disease or an allergic disease.

[0038] In another aspect, the disclosure provides a method of inducing a T cell response to an antigen in a subject in need thereof, said method comprising: obtaining a population of cells from the subject, wherein the population comprises a T cell, contacting the population of cells with the aAPC of any one of the above aspects, wherein contacting the population of cells with the aAPC induces proliferation of an antigen-specific T cell that is specific for the at least one exogenous antigenic polypeptide, and administering the antigen-specific T cell to the subject, thereby inducing a T cell response to the antigen in the subject in need thereof. In some embodiments, the method further comprises isolating the antigen-specific T cell from the population of cells.

[0039] In another aspect, the disclosure provides a method of expanding a population of regulatory T (Treg) cells, the method comprising: obtaining a population of cells from a subject, wherein the population comprises a Treg cell, contacting the population with the aAPC of any one of the above aspects, wherein contacting the population with the aAPC induces proliferation of the Treg cell, thereby expanding the population of Treg cells. In some embodiments, the method further comprises isolating the Treg cell from the population of cells. In some embodiments, the method further comprises administering the Treg cell to the subject.

[0040] In another aspect, the disclosure provides a method of making the aAPC of any one of the above aspects, the method comprising: introducing an exogenous nucleic acid encoding the exogenous antigenic polypeptide into a nucleated cell; and culturing the nucleated cell under conditions suitable for enucleation and for production of the exogenous antigenic polypeptide, thereby making an enucleated cell, thereby making the aAPC.

[0041] In one embodiment, the nucleated cell is a nucleated erythroid precursor cell. In one embodiment, the enucleated cell (e.g., engineered enucleated cell) is an enucleated erythroid cell, e.g., an erythrocyte or a reticulocyte. In one embodiment, the enucleated cell (e.g., engineered enucleated cell) is a platelet.

[0042] In another aspect, the disclosure provides a method of making the aAPC of any one of the above aspects, the method comprising: introducing an exogenous nucleic acid encoding the exogenous antigen-presenting polypeptide into a nucleated cell; culturing the nucleated cell under conditions suitable for enucleation and for production of the exogenous antigen-presenting polypeptide, thereby making an enucleated cell; and contacting the enucleated cell with at least one exogenous antigenic polypeptide, wherein the at least one exogenous antigenic polypeptide binds to the exogenous antigen-presenting polypeptide which is present on the cell surface of the enucleated cell, thereby making the aAPC.

[0043] In one embodiment, the at least one exogenous antigenic polypeptide specifically binds to the exogenous antigen-presenting polypeptide which is present on the cell surface of the enucleated cell

[0044] In one embodiment, the nucleated cell is a nucleated erythroid precursor cell. In one embodiment, the enucleated cell (e.g., engineered enucleated cell) is an enucleated erythroid cell, e.g., an erythrocyte or a reticulocyte. In one embodiment, the enucleated cell (e.g., engineered enucleated cell) is a platelet.

[0045] In another aspect, the disclosure provides a method of making the aAPC of any one of the above aspects, the method comprising: introducing an exogenous nucleic acid encoding the exogenous antigenic polypeptide into a nucleated cell; introducing an exogenous nucleic acid encoding the exogenous antigen-presenting polypeptide into the nucleated cell; and culturing the nucleated cell under conditions suitable for enucleation and for production of the exogenous antigenic polypeptide and the exogenous antigen-presenting polypeptide, thereby making an enucleated cell, thereby making the aAPC.

[0046] In one embodiment, the nucleated cell is a nucleated erythroid precursor cell. In one embodiment, the enucleated cell (e.g., engineered enucleated cell) is an enucleated erythroid cell, e.g., an erythrocyte or a reticulocyte. In one embodiment, the enucleated cell (e.g., engineered enucleated cell) is a platelet.

[0047] In some embodiments, the exogenous nucleic acid comprises DNA. In some embodiments, the exogenous nucleic acid comprises RNA.

[0048] In some embodiments, the introducing step comprises viral transduction. In some embodiments, the introducing step comprises electroporation. In some embodiments, the introducing step comprises utilizing one or more of: liposome mediated transfer, adenovirus, adeno-associated virus, herpes virus, a retroviral based vector, lipofection, and a lentiviral vector.

[0049] In another aspect, the disclosure provides a method of making an immunologically compatible artificial antigen presenting cell (aAPC), wherein the aAPC comprises an enucleated cell that comprises on the cell surface an exogenous antigenic polypeptide, the method comprising: contacting a nucleated cell with a nuclease and at least one gRNA which cleave an endogenous nucleic acid to result in production of an endogenous antigen-presenting polypeptide, an endogenous anchor polypeptide, or an endogenous costimulatory polypeptide; or to result in inhibition of expression of an endogenous microRNA; introducing an exogenous nucleic acid encoding the exogenous antigenic polypeptide into the nucleated cell; and culturing the nucleated cell under conditions suitable for enucleation and for production and presentation of the exogenous antigenic polypeptide by the endogenous antigen-presenting polypeptide, thereby making an enucleated cell, thereby making the immunologically compatible aAPC.

[0050] In some embodiments, the exogenous nucleic acid is contacted with a nuclease and at least one gRNA.

[0051] In yet another aspect, the disclosure features an artificial antigen presenting cell (aAPC) engineered to activate T cells, wherein the aAPC comprises an erythroid cell or enucleated cell, wherein the erythroid cell or enucleated cell presents, e.g., comprises on the cell surface, at least one exogenous antigenic polypeptide disclosed in Table 1.

[0052] In some embodiments, the at least one exogenous antigenic polypeptide is a tumor antigen, an autoimmune disease antigen, a viral antigen, a bacterial antigen or a parasite.

[0053] In another aspect, the disclosure features an artificial antigen presenting cell (aAPC) engineered to activate T cells, wherein the aAPC comprises an erythroid cell or enucleated cell, wherein the erythroid cell or enucleated cell presents, e.g., comprises on the cell surface, a first exogenous antigenic polypeptide and a second exogenous antigenic polypeptide, and wherein the first exogenous antigenic polypeptide and the second exogenous antigenic polypeptide have amino acid sequences which overlap by at least 2 amino acids.

[0054] In some embodiments, the overlap is between 2 amino acids and 23 amino acids.

[0055] In some embodiments, the aAPC further presents, e.g., comprises on the cell surface, an exogenous antigen-presenting polypeptide.

[0056] In some embodiments, the exogenous antigen-presenting polypeptide is an MHC class I polypeptide, an MHC class I single chain fusion, an MHC class II polypeptide, or an MHC class II single chain fusion.

[0057] In some embodiments, the MHC class I polypeptide is selected from the group consisting of: HLA A, HLA B, and HLA C.

[0058] In some embodiments, the MHC class II polypeptide is selected from the group consisting of: HLA-DPα, HLA-DPβ, HLA-DM, HLA DOA, HLA DOB, HLA DQα, HLA DQβ, HLA DRα, and HLA DRβ.

[0059] In some embodiments of the above aspects and embodiments, the erythroid cell is an enucleated erythroid cell.

[0060] In yet another aspect, the disclosure features an artificial antigen presenting cell (aAPC) engineered to activate T cells, wherein the aAPC comprises an erythroid cell or enucleated cell, wherein the erythroid cell or enucleated cell presents, e.g., comprises on the cell surface, an exogenous antigen-presenting polypeptide and an exogenous antigenic polypeptide, wherein the exogenous antigen-presenting polypeptide is an MHC class I single chain fusion or an MHC class II single chain fusion, wherein, e.g., the exogenous antigenic polypeptide is specifically bound to the exogenous antigen-presenting polypeptide.

[0061] In some embodiments, the MHC class I single chain fusion comprises an anchor, an α-chain, and a β2m chain. In some embodiments, the exogenous antigenic polypeptide is connected to the MHC I single chain fusion via a linker. In some embodiments, the linker is a cleavable linker.

[0062] In some embodiments, the MHC class II single chain fusion comprises an anchor, an α-chain, and a β chain. In some embodiments, the exogenous antigenic polypeptide is connected to the MHC II single chain fusion via a linker. In some embodiments, the linker is a cleavable linker. In some embodiments, the anchor is a Type 1 Membrane Protein. In some embodiments, the anchor is a Type 2 Membrane Protein. In some embodiments, the anchor is a GPI-linked protein. In some embodiments, the anchor is GPA or SMIM1.

[0063] In some embodiments, the exogenous antigenic polypeptide is bound to the exogenous antigen-presenting polypeptide. In some embodiments, the exogenous antigenic polypeptide is bound to the exogenous antigen-presenting polypeptide covalently or non-covalently.

[0064] In some embodiments, the aAPC of any one of the foregoing aspects further presents, e.g., comprises on the cell surface, at least one exogenous costimulatory polypeptide.

[0065] In some embodiments, the at least one exogenous costimulatory polypeptide is selected from the group consisting of 4-1BBL, LIGHT, anti CD28, CD80, CD86, CD70, OX40L, GITRL, TIM4, SLAM, CD48, CD58, CD83, CD155, CD112, IL-7, IL-12, IL-15Rα fused to IL-15, IL-21, ICAM-1, a ligand for LFA-1, anti CD3, and a combination thereof.

[0066] In some embodiments, the aAPC presents, e.g., comprises on the cell surface, at least two, at least 3, at least 4, or at least 5 exogenous costimulatory polypeptides.

[0067] In some embodiments, the aAPC is capable of activating a T cell that interacts with the aAPC. In some embodiments, the activating comprises activation of CD8+ T cells, activation of CD4+ T cells, stimulation of cytotoxic activity of T cells, stimulation of cytokine secretion by T cells, and/or any combination thereof.

[0068] In some embodiments of the above aspects and embodiments, the erythroid cell is an enucleated erythroid cell.

[0069] In still another aspect, the disclosure features an artificial antigen presenting cell (aAPC) engineered to suppress T cell activity, wherein the aAPC comprises an erythroid cell or enucleated cell, wherein the erythroid cell or enucleated cell presents, e.g., comprises on the cell surface, an exogenous antigen-presenting polypeptide, an exogenous antigenic polypeptide and at least one exogenous co-inhibitory polypeptide disclosed in Table 7, wherein, e.g., the exogenous antigenic polypeptide is specifically bound to the exogenous antigen-presenting polypeptide. In some embodiments, the erythroid cell is an enucleated erythroid cell.

[0070] In another aspect, the disclosure features an artificial antigen presenting cell (aAPC) engineered to suppress T cell activity, wherein the aAPC comprises an erythroid cell or enucleated cell, wherein the erythroid cell or enucleated cell presents, e.g., comprises on the cell surface, an exogenous antigen-presenting polypeptide, an exogenous antigenic polypeptide disclosed in Table 1, and at least one exogenous co-inhibitory polypeptide, wherein, e.g., the exogenous antigenic polypeptide is specifically bound to the exogenous antigen-presenting polypeptide. In some embodiments, the erythroid cell is an enucleated erythroid cell.

[0071] In some embodiments, the aAPC further comprises a metabolite-altering polypeptide.

[0072] In another aspect, the disclosure features an artificial antigen presenting cell (aAPC) engineered to suppress T cell activity, wherein the aAPC comprises an erythroid cell or enucleated cell, wherein the erythroid cell or enucleated cell presents, e.g., comprises on the cell surface, an exogenous antigen-presenting polypeptide, an exogenous antigenic polypeptide, and at least one metabolite-altering polypeptide, wherein, e.g., the exogenous antigenic polypeptide is specifically bound to the exogenous antigen-presenting polypeptide.

[0073] In some embodiments, the aAPC further comprising an exogenous co-inhibitory polypeptide. In some embodiments, the exogenous co-inhibitory polypeptide is IL-35, IL-10, VSIG-3, PD-L1 or a LAG3 agonist.

[0074] In some embodiments, the metabolite-altering polypeptide is IDO, Arg1, CD39, CD73, TDO, TPH, iNOS, COX2 or PGE synthase.

[0075] In some embodiments, the aAPC is capable of suppressing a T cell that interacts with the aAPC.

[0076] In some embodiments, the suppressing comprises inhibition of proliferation of a T cell, anergizing of a T cell, or induction of apoptosis of a T cell. In some embodiments, the T cell is a CD4+ T cell or a CD8+ T cell.

[0077] In some embodiments of the above aspects and embodiments, the erythroid cell is an enucleated erythroid cell.

[0078] In another aspect, the disclosure features an artificial antigen presenting cell (aAPC) engineered to activate a regulatory T cell (Treg cell), wherein the aAPC comprises an erythroid cell or enucleated cell, wherein the erythroid cell or enucleated cell presents, e.g., comprises on the cell surface, an exogenous antigen-presenting polypeptide and an exogenous antigenic polypeptide, wherein, e.g., the exogenous antigenic polypeptide is specifically bound to the exogenous antigen-presenting polypeptide.

[0079] In some embodiments, the aAPC further presents, e.g., comprises on the cell surface, an exogenous Treg expansion polypeptide.

[0080] In some embodiments, the exogenous antigen-presenting polypeptide is an MHC class II polypeptide or an MHC class II single chain fusion. In some embodiments, the MHC class II polypeptide is selected from the group consisting of: HLA-DPα, HLA-DPβ, HLA-DM, HLA DOA, HLA DOB, HLA DQα, HLA DQβ, HLA DRα, and HLA DRβ. In some embodiments, the MHC class II single chain fusion comprises an anchor, an α-chain, and a β chain.

[0081] In some embodiments, the exogenous antigenic polypeptide is connected to the MHC class II single chain fusion via a linker. In some embodiments, the linker is a cleavable linker.

[0082] In some embodiments, the anchor is GPA or SMIM1.

[0083] In some embodiments, the exogenous antigenic polypeptide is bound to the exogenous antigen-presenting polypeptide. In some embodiments, the exogenous antigenic polypeptide is bound to the exogenous antigen-presenting polypeptide covalently or non-covalently.

[0084] In some embodiments, the exogenous Treg expansion polypeptide is IL-2, CD25-specific IL-2, TNFR2-specific TNF, antiDR3 agonist (VEGI/TL1A specific), 4-1BBL, TGFβ.

[0085] In some embodiments, the exogenous antigenic polypeptide is 8 amino acids in length to 24 amino acids in length.

[0086] In some embodiments, the enucleated cell is an erythroid cell or a platelet.

[0087] In some embodiments of the above aspects and embodiments, the erythroid cell is an enucleated erythroid cell.

[0088] In another aspect, the disclosure features a method of activating an antigen-specific T cell, the method comprising contacting the T cell with an aAPC disclosed herein, thereby activating the antigen-specific T cell.

[0089] In another aspect, the disclosure features a method for inducing proliferation of a T cell expressing a receptor molecule, the method comprising contacting the T cell with an aAPC disclosed herein, wherein the costimulatory polypeptide specifically binds with the receptor molecule, thereby inducing proliferation of said T cell.

[0090] In another aspect, the disclosure features a method of expanding a subset of a T cell population, the method comprising contacting a population of T cells comprising at least one T cell of the subset with an aAPC disclosed herein, wherein the exogenous costimulatory polypeptide presented on the aAPC specifically binds with a receptor molecule on the at least one T cell of the subset, and wherein binding of exogenous costimulatory polypeptide to the receptor molecule induces proliferation of the at least one T cell of the subset, thereby expanding the subset of the T cell population.

[0091] In another aspect, the disclosure features a method of suppressing activity of a T cell, the method comprising contacting the T cell with an aAPC disclosed herein, thereby suppressing activity of the T cell.

[0092] In another aspect, the disclosure features a method for activating a Treg cell, the method comprising contacting the Treg cell with an aAPC disclosed herein, thereby activating the Treg cell.

[0093] In another aspect, the disclosure features a method of treating a subject in need of an altered immune response, the method comprising contacting a T cell of the subject with an aAPC as disclosed hereein, thereby treating the subject in need of an altered immune response.

[0094] In some embodiments, the contacting is in vitro or in vivo.

[0095] In another aspect, the disclosure features a method of treating a subject in need of an altered immune response, the method comprising: a) determining an expression profile of an antigen on a cell in the subject; b) selecting an artificial antigen presenting cell (aAPC), wherein the aAPC is an engineered erythroid cell expressing an antigen-presenting polypeptide and at least one first exogenous antigenic polypeptide; and c) administering the aAPC to the subject, thereby treating the subject in need of the altered immune response.

[0096] In another aspect, the disclosure features a method of treating a subject in need of an altered immune response, the method comprising: a) determining an HLA status of the subject; b) selecting an artificial antigen presenting cell (aAPC) that is immunologically compatible with the subject, wherein the aAPC is an engineered erythroid cell expressing at least one first exogenous antigenic polypeptide and at least one antigen-presenting polypeptide; and c) administering the aAPC to the subject, thereby treating the subject in need of the altered immune response.

[0097] In some embodiments, the subject is in need of an increased immune response. In some embodiments, the subject has cancer or an infectious disease. In some embodiments, the subject is in need of a decreased immune response. In some embodiments, the subject has an autoimmune disease or an allergic disease.

[0098] In another aspect, the disclosure features a method of inducing a T cell response to an antigen in a subject in need thereof, said method comprising: obtaining a population of cells from the subject, wherein the population comprises a T cell; contacting the population of cells with an aAPC disclosed herein, wherein contacting the population of cells with the aAPC induces proliferation of an antigen-specific T cell that is specific for the at least one exogenous antigenic polypeptide, and administering the antigen-specific T cell to the subject, thereby inducing a T cell response to the antigen in the subject in need thereof.

[0099] In some embodiments, the method further comprises isolating the antigen-specific T cell from the population of cells.

[0100] In another aspect, the disclosure features a method of expanding a population of regulatory T (Treg) cells, the method comprising: obtaining a population of cells from the subject, wherein the population comprises a Treg cell; contacting the population with an aAPC disclosed herein, wherein contacting the population with the aAPC induces proliferation of the Treg cell, thereby expanding the population of Treg cells.

[0101] In some embodiments, the method further comprises isolating the Treg cell from the population of cells.

[0102] In some embodiments, the method further comprises administering the Treg cell to the subject.

[0103] In some embodiments of each of the above methods, the erythroid cell is an enucleated erythroid cell.

[0104] In another aspect, the disclosure features a method of making an aAPC of the invention, the method comprising: introducing an exogenous nucleic acid encoding the exogenous antigenic polypeptide into a nucleated cell; and culturing the nucleated cell under conditions suitable for expression and presentation of the exogenous antigenic polypeptide, and enucleation, thereby making an enucleated cell, thereby making the aAPC.

[0105] In another aspect, the disclosure features a method of making an aAPC of the invention, the method comprising: introducing an exogenous nucleic acid encoding the exogenous antigen-presenting polypeptide into a nucleated cell; culturing the nucleated cell under conditions suitable for expression and presentation of the exogenous antigen-presenting polypeptide, and enucleation, thereby making an enucleated cell; and contacting the enucleated cell with at least one exogenous antigenic polypeptide, wherein the at least one exogenous antigenic polypeptide binds to the exogenous antigen-presenting polypeptide which is presented on the enucleated cell, thereby making the aAPC.

[0106] In some embodiments, the exogenous nucleic acid comprises DNA or RNA.

[0107] In some embodiments, the introducing step comprises viral transduction. In some embodiments, the introducing step comprises electroporation. In some embodiments, the introducing step comprises utilizing one or more of: liposome mediated transfer, adenovirus, adeno-associated virus, herpes virus, a retroviral based vector, lipofection, and a lentiviral vector.

[0108] In another aspect, the disclosure features a method of making an immunologically compatible artificial antigen presenting cell (aAPC), wherein the aAPC comprises an enucleated cell that presents, e.g. comprises on the cell surface, an exogenous antigenic polypeptide, the method comprising: contacting a nucleated cell with a nuclease and at least one gRNA which cleave an endogenous nucleic acid to result in expression of an endogenous antigen-presenting polypeptide, an endogenous anchor polypeptide, or an endogenous costimulatory polypeptide; or to result in inhibition of expression of an endogenous microRNA; introducing an exogenous nucleic acid encoding the exogenous antigenic polypeptide into the nucleated cell; and culturing the nucleated cell under conditions suitable for expression and presentation of the exogenous antigenic polypeptide by the endogenous antigen-presenting polypeptide, and enucleation, thereby making an enucleated cell, thereby making the immunologically compatible aAPC.

[0109] In some embodiments, the exogenous nucleic acid is contacted with a nuclease and at least one gRNA.

[0110] In some embodiments of any of the above aspects and embodiments, the erythroid cell is an enucleated erythroid cell.

### BRIEF DESCRIPTION OF THE DRAWINGS

[0111] The figures are meant to be illustrative of one or more features, aspects, or embodiments of the invention and are not intended to be limiting.

[0112] FIGS. 1A & FIG. 1B are schematics showing various designs for expressing MHCI and MHCII molecules on erythroid cells. FIG. 1A shows a schematic of the design for expressing single-chain peptide-MHCII constructs. As shown in FIG. 1A, an exogenous peptide is linked to the MHCII β-chain, linked to the MHCII α-chain, linked to a membrane anchor, such as GPA or SMIM. FIG. 1B shows a schematic of the design for expressing single-chain peptide-MHCI constructs. As shown in FIG. 1B, an exogenous peptide is linked to the MHCI β-2m subunit, linked to the MHCI α subunit linked to a membrane anchor, such as GPA or SMIM.

[0113] FIG. 2 is a graph showing that engineered murine erythrocytes presenting MHC I (ovalbumin) and 4-1BBL activate ova-specific T cells.

[0114] FIG. 3 is a graph showing that ova-specific T cells expanded with murine erythrocytes presenting MHC I (ovalbumin) and 4-1BBL are highly potent and specific in tumor cell killing.

[0115] FIG. 4A is a schematic showing the experimental design to study the proliferation of OT1-T cells in lymph nodes and spleen

[0116] FIG. 4B is a schematic of representative data, showing that mRCT-4-1BBL OVA specifically expand and activate OT1-T cells, while mRCT-4-1BBL without MHCI presenting ovalbumin peptide on the cell surface do not expand and activate OT1-T cells. As used herein throughout, mouse red cell therapeutic (or mRCT) refers to murine engineered erythroid cells (e.g. an engineered enucleated cell) described herein. As used herein throughout, RCT (red cell therapeutic) refers to human engineered erythroid cells (e.g. an engineered enucleated cell) described herein.

[0117] FIG. 4C is a graph showing in vivo observations for the proliferation and activation of OT1-T cells by mRCT-4-1BBL OVA in circulation, spleen and lymph node.

[0118] FIG. 5A-D are graphs showing erythroid cells engineered to present MHCI (ovalbumin) and 4-1BBL exhibit an in vivo dose response ova-specific T cells in vivo.

[0119] FIG. 6 is a graph showing that a second dose of the erythroid cells engineered to present MHCI (ovalbumin) and 4-1BBL dramatically boosts CD8+OT1 T-Cells in both lymph node and spleen.

[0120] FIG. 7 is a graph showing that erythroid cells engineered to present MHCI (gp100) and 4-1BBL activate gp100-specific T cells in vitro.

[0121] FIG. 8A is a schematic showing the different versions of HLA-A2 (HPV E7) expressed on RCTs. FIG. 8A discloses “YMLDLQPETGGGGS(G4S)2” as SEQ ID NO: 895 and “(G4S)4” as SEQ ID NO: 733.

[0122] FIGS. 8B and 8C are graphs showing the activity of HLA-A2 (HPV E7) expressed on RCTs, in stimulating HPV-specific T cells in vitro.

[0123] FIG. 9 is a graph showing the change in average tumor volume (mm³) over time after tumor randomization, where mice are dosed with mRCT (control) and mRCT-OVA-4-1BBL at days 1, 4 and 8 after OT1 CD8+ T cell injection.

[0124] FIG. 10 is a graph showing the change in individual tumor volume (mm³) over time after tumor randomization, where mice are dosed with mRCT (control) and mRCT-OVA-4-1BBL at days 1, 4 and 8 after OT1 CD8+ T cell injection.

[0125] FIG. 11 is a graph showing percent survival of mice over time after tumor randomization, where mice are dosed with mRCT (control) and mRCT-OVA-4-1BBL at days 1, 4 and 8 after OT1 CD8+ T cell injection.

[0126] FIG. 12 shows the results of flow cytometry experiments, gating for CD44+ expression, to determine OT1 CD8+ T cell proliferation.

[0127] FIG. 13 is a graph showing OT1 CD8+ T cell count at day 4 following coincubation of mRCTs (control and clicked) with OT1 CD8+ T cells. FIG. 14A is a graph showing that triple clicked mRCTs (mRCT-OVA-4-1BBL-IL7, mRCT-OVA-4-1BBL-IL12, or mRCT-OVA-4-1BBL-IL15), show increased OT1 CD8+ T cell proliferation over the double clicked mRCTs (mRCT-OVA-4-1BBL).

[0128] FIG. 14B is a panel of graphs showing percentages of memory stem T cells (Tscm), central memory T cells (Tcm) and effector memory T cells (Tem) activated by the double clicked mRCTs (mRCT-OVA-4-1BBL), or triple clicked mRCTs (mRCT-OVA-4-1BBL-IL7, mRCT-OVA-4-1BBL-IL12, or mRCT-OVA-4-1BBL-IL15).

[0129] FIGS. 15A and 15B are graphs showing that the mice treated with mRCT-OVA-4-1BBL demonstrate EG7.OVA tumor control even upon being re-challenged with EG7.OVA tumor cells.

[0130] FIG. 16A is a schematic showing the timeline of mice being re-challenged with OVA peptide (SIINFEKL (SEQ ID NO: 721))+ Incomplete Freund's adjuvant (IFA).

[0131] FIG. 16B is a graph showing that mice treated with mRCT-OVA had lower OT1 cell counts upon OVA peptide re-challenge as compared to mice dosed only with mRCT in both spleen and lymph node.

[0132] FIG. 16C is a graph showing that the endogenous CD8+ T cell counts were not impacted upon OVA peptide re-challenge as compared to mice dosed only with mRCT in both spleen and lymph node.

[0133] FIG. 17A is a schematic showing the different options of configurations, for presenting signals 1 and 2 on the surface of an RCT.

[0134] FIG. 17B is a schematic showing the different options of configurations, for presenting signals 1, 2 and 3 on the surface of an RCT.

### DETAILED DESCRIPTION

[0135] The present disclosure is based on the development of artificial antigen presenting cells (aAPCs) with efficient signal presentation, that can be used for, e.g. in vivo aAPC immunotherapy and ex vivo for T cell expansion. In particular, the present disclosure is based, at least in part, upon the surprising finding that erythroid cells, and in particular engineered erythroid cells, can be engineered to, inter alia, activate, expand or differentiate/de-differentiate T cells, suppress T cell activity, suppress T effector cells, and/or stimulate and expand T regulatory cells.

[0136] Many modifications and other embodiments of the inventions set forth herein will easily come to mind to one skilled in the art to which these inventions pertain having the benefit of the teachings presented in the foregoing descriptions and the associated drawings. Therefore, it is to be understood that the inventions are not to be limited to the specific embodiments disclosed and that modifications and other embodiments are intended to be included within the scope of the appended claims. Although specific terms are employed herein, they are used in a generic and descriptive sense only and not for purposes of limitation.

### Definitions

[0137] As used in this specification and the appended claims, the singular forms “a”, “an” and “the” include plural references unless the content clearly dictates otherwise.

[0138] The use of the alternative (e.g., “or”) should be understood to mean either one, both, or any combination thereof of the alternatives.

[0139] As used herein, the term “about,” when referring to a measurable value such as an amount, a temporal duration, and the like, is meant to encompass variations of ±20% or ±10%, more preferably ±5%, even more preferably ±1%, and still more preferably ±0.1% from the specified value, as such variations are appropriate to perform the disclosed methods.

[0140] As used herein, any concentration range, percentage range, ratio range, or integer range is to be understood to include the value of any integer within the recited range and, when appropriate, fractions thereof (such as one tenth and one hundredth of an integer), unless otherwise indicated.

[0141] As used herein, “comprise,” “comprising,” and “comprises” and “comprised of” are meant to be synonymous with “include”, “including”, “includes” or “contain”, “containing”, “contains” and are inclusive or open-ended terms that specifies the presence of what follows e.g. component and do not exclude or preclude the presence of additional, non-recited components, features, element, members, steps, known in the art or disclosed therein.

[0142] As used herein, the terms “such as”, “for example” and the like are intended to refer to exemplary embodiments and not to limit the scope of the present disclosure.

[0143] Unless defined otherwise, all technical and scientific terms used herein have the same meaning as commonly understood by one of ordinary skill in the art to which the invention pertains. Although any methods and materials similar or equivalent to those described herein can be used in the practice for testing of the present invention, preferred materials and methods are described herein.

[0144] As used herein, “administration,” “administering” and variants thereof refers to introducing a composition or agent into a subject and includes concurrent and sequential introduction of a composition or agent. “Administration” can refer, e.g., to therapeutic, pharmacokinetic, diagnostic, research, placebo, and experimental methods. “Administration” also encompasses in vitro and ex vivo treatments. The introduction of a composition or agent into a subject is by any suitable route, including orally, pulmonarily, intranasally, parenterally (intravenously, intramuscularly, intraperitoneally, or subcutaneously), rectally, intralymphatically, or topically. Administration includes self-administration and the administration by another. Administration can be carried out by any suitable route. A suitable route of administration allows the composition or the agent to perform its intended function. For example, if a suitable route is intravenous, the composition is administered by introducing the composition or agent into a vein of the subject.

[0145] As used herein, the term an “antigen-presenting cell (APC)” refers to a cell that can process and display foreign antigens in association with major histocompatibility complex (MHC) molecules on its surface.

[0146] As used herein, the term an “artificial antigen presenting cell” refers to cells that have been engineered to introduce one or more molecules (e.g. exogenous polypeptides) that provide the necessary T cell receptor (TCR), costimulatory, and/or adhesion events required for immune synapse formation.

[0147] As used herein, the term “autoimmune disorders” refers generally to conditions in which a subject's immune system attacks the body's own cells, causing tissue destruction. Autoimmune disorders may be diagnosed using blood tests, cerebrospinal fluid analysis, electromyogram (measures muscle function), and magnetic resonance imaging of the brain, but antibody testing in the blood, for self-antibodies (or auto-antibodies) is particularly useful. Usually, IgG class antibodies are associated with autoimmune diseases.

[0148] As used herein, the term “biological sample” refers to any type of material of biological origin isolated from a subject, including, for example, DNA, RNA, lipids, carbohydrates, and protein. The term “biological sample” includes tissues, cells and biological fluids isolated from a subject. Biological samples include, e.g., but are not limited to, whole blood, plasma, serum, semen, saliva, tears, urine, fecal material, sweat, buccal, skin, cerebrospinal fluid, bone marrow, bile, hair, muscle biopsy, organ tissue or other material of biological origin known by those of ordinary skill in the art. Biological samples can be obtained from subjects for diagnosis or research or can be obtained from healthy subjects, as controls or for basic research.

[0149] As used herein, the term “cancer” refers to diseases in which abnormal cells divide without control and are able to invade other tissues. There are more than 100 different types of cancer. Most cancers are named for the organ or type of cell in which they start—for example, cancer that begins in the colon is called colon cancer; cancer that begins in melanocytes of the skin is called melanoma. Cancer types can be grouped into broader categories. The main categories of cancer include: carcinoma (meaning a cancer that begins in the skin or in tissues that line or cover internal organs, and its subtypes, including adenocarcinoma, basal cell carcinoma, squamous cell carcinoma, and transitional cell carcinoma); sarcoma (meaning a cancer that begins in bone, cartilage, fat, muscle, blood vessels, or other connective or supportive tissue); leukemia (meaning a cancer that starts in blood-forming tissue (e.g., bone marrow) and causes large numbers of abnormal blood cells to be produced and enter the blood; lymphoma and myeloma (meaning cancers that begin in the cells of the immune system); and central nervous system (CNS) cancers (meaning cancers that begin in the tissues of the brain and spinal cord). The term “myelodysplastic syndrome” refers to a type of cancer in which the bone marrow does not make enough healthy blood cells (white blood cells, red blood cells, and platelets) and there are abnormal cells in the blood and/or bone marrow. Myelodysplastic syndrome may become acute myeloid leukemia (AML). In certain embodiments, the cancer is selected from cancers including, but not limited to, ACUTE lymphoblastic leukemia (ALL), ACUTE myeloid leukemia (AML), anal cancer, bile duct cancer, bladder cancer, bone cancer, bowel cancer, brain tumour, breast cancer, cancer of unknown primary, cancer spread to bone, cancer spread to brain, cancer spread to liver, cancer spread to lung, carcinoid, cervical cancer, choriocarcinoma, chronic lymphocytic leukemia (CLL), chronic myeloid leukemia (CML), colon cancer, colorectal cancer, endometrial cancer, eye cancer, gallbladder cancer, gastric cancer, gestational trophoblastic tumour (GTT), hairy cell leukemia, head and neck cancer, Hodgkin lymphoma, kidney cancer, laryngeal cancer, leukemia, liver cancer, lung cancer, lymphoma, melanoma skin cancer, mesothelioma, men's cancer, molar pregnancy, mouth and oropharyngeal cancer, myeloma, nasal and sinus cancers, nasopharyngeal cancer, non hodgkin lymphoma (NHL), oesophageal cancer, ovarian cancer, pancreatic cancer, penile cancer, prostate cancer, rare cancers, rectal cancer, salivary gland cancer, secondary cancers, skin cancer (non melanoma), soft tissue sarcoma, stomach cancer, testicular cancer, thyroid cancer, unknown primary cancer, uterine cancer, vaginal cancer, and vulval cancer.

[0150] As used herein, the term “click reaction” refers to a range of reactions used to covalently link a first and a second moiety, for convenient production of linked products. It typically has one or more of the following characteristics: it is fast, is specific, is high-yield, is efficient, is spontaneous, does not significantly alter biocompatibility of the linked entities, has a high reaction rate, produces a stable product, favors production of a single reaction product, has high atom economy, is chemoselective, is modular, is stereoselective, is insensitive to oxygen, is insensitive to water, is high purity, generates only inoffensive or relatively non-toxic by-products that can be removed by nonchromatographic methods (e.g., crystallization or distillation), needs no solvent or can be performed in a solvent that is benign or physiologically compatible, e.g., water, stable under physiological conditions. Examples include an alkyne/azide reaction, a diene/dienophile reaction, or a thiol/alkene reaction. Other reactions can be used. In some embodiments, the click reaction is fast, specific, and high-yield.

[0151] As used herein, the term “click handle” refers to a chemical moiety that is capable of reacting with a second click handle in a click reaction to produce a click signature. In some embodiments, a click handle is comprised by a coupling reagent, and the coupling reagent may further comprise a substrate reactive moiety.

[0152] As used herein, the term “cytokine” refers to small soluble protein substances secreted by cells which have a variety of effects on other cells. Cytokines mediate many important physiological functions including growth, development, wound healing, and the immune response. They act by binding to their cell-specific receptors located in the cell membrane, which allows a distinct signal transduction cascade to start in the cell, which eventually will lead to biochemical and phenotypic changes in target cells. Cytokines can act both locally and distantly from a site of release. They include type I cytokines, which encompass many of the interleukins, as well as several hematopoietic growth factors; type II cytokines, including the interferons and interleukin-10; tumor necrosis factor (“TNF”)-related molecules, including TNFα and lymphotoxin; immunoglobulin super-family members, including interleukin 1 (“IL-1”); and the chemokines, a family of molecules that play a critical role in a wide variety of immune and inflammatory functions. The same cytokine can have different effects on a cell depending on the state of the cell. Cytokines often regulate the expression of, and trigger cascades of other cytokines. Non limiting examples of cytokines include e.g., IL-1α, IL-β, IL-2, IL-3, IL-4, IL-5, IL-6, IL-7, IL-8, IL-9, IL-10, IL-11, IL-12/IL-23 P40, IL13, IL-15, IL-17, IL-18, IL-21, IL-23, TGF-β, IFN-γ, GM-CSF, Groα, MCP-1 and TNF-α.

[0153] As used herein, the term “endogenous” is meant to refer to a native form of compound (e.g., a small molecule) or process. For example, in some embodiments, the term “endogenous” refers to the native form of a nucleic acid or polypeptide in its natural location in the organism or in the genome of an organism.

[0154] As used herein, the term “an engineered cell” as used herein is a genetically-modified cell or progeny thereof. In some embodiments, an engineered cell (e.g. an engineered enucleated cell) can be produced using coupling reagents to link an exogenous polypeptide to the surface of the cell (e.g. using click chemistry).

[0155] As used herein, the term “enucleated” refers to a cell, e.g., a reticulocyte or mature red blood cell (erythrocyte), that lacks a nucleus. In an embodiment an enucleated cell is a cell that has lost its nucleus through differentiation from a precursor cell, e.g., a hematopoietic stem cell (e.g., a CD34+ cell), a common myeloid progenitor (CMP), a megakaryocyte erythrocyte progenitor cell (MEP), a burst-forming unit erythrocyte (BFU-E), a colony-forming unit erythrocyte (CFU-E), a pro-erythroblast, an early basophilic erythroblast, a late basophilic erythroblast, a polychromatic erythroblast, or an orthochromatic erythroblast, or an induced pluripotent cell, into a reticulocyte or mature red blood cell. In an embodiment an enucleated cell is a cell that has lost its nucleus through in vitro differentiation from a precursor cell, e.g., a hematopoietic stem cell (e.g., a CD34+ cell), a common myeloid progenitor (CMP), a megakaryocyte erythrocyte progenitor cell (MEP), a burst-forming unit erythrocyte (BFU-E), a colony-forming unit erythrocyte (CFU-E), a pro-erythroblast, an early basophilic erythroblast, a late basophilic erythroblast, a polychromatic erythroblast, or an orthochromatic erythroblast, or an induced pluripotent cell into a reticulocyte or mature red blood cell. In an embodiment an enucleated cell lacks DNA. In an embodiment an enucleated cell is incapable of expressing a polypeptide, e.g., incapable of transcribing and/or translating DNA into protein, e.g., lacks the cellular machinery necessary to transcribe and/or translate DNA into protein. In some embodiments, an enucleated cell is an erythrocyte, a reticulocyte, or a platelet.

[0156] In some embodiments, the enucleated cells are not platelets, and therefore are “platelet free enucleated” cells (“PFE” cells). It should be understood that platelets do not have nuclei, and in this particular embodiment, platelets are not intended to be encompassed.

[0157] As used herein, “erythroid cell” includes a nucleated red blood cell, a red blood cell precursor, an enucleated mature red blood cell, and a reticulocyte. As used herein, an erythroid cell includes an erythroid precursor cell, a cell capable of differentiating into a reticulocyte or erythrocyte. For example, erythroid precursor cells include any of a cord blood stem cell, a CD34+ cell, a hematopoietic stem cell (HSC), a spleen colony forming (CFU-S) cell, a common myeloid progenitor (CMP) cell, a blastocyte colony-forming cell, a burst forming unit-erythroid (BFU-E), a megakaryocyte-erythroid progenitor (MEP) cell, an erythroid colony-forming unit (CFU-E), a reticulocyte, an erythrocyte, an induced pluripotent stem cell (iPSC), a mesenchymal stem cell (MSC), a polychromatic normoblast, an orthochromatic normoblast. A preparation of erythroid cells can include any of these cells or a combination thereof. In some embodiments, the erythroid precursor cells are immortal or immortalized cells. For example, immortalized erythroblast cells can be generated by retroviral transduction of CD34+ hematopoietic progenitor cells to express Oct4, Sox2, Klf4, cMyc, and suppress TP53 (e.g., as described in Huang et al., Mol Ther (2014) Mol. Ther. 22(2): 451-63, the entire contents of which are incorporated by reference herein). In addition, the cells may be intended for autologous use or provide a source for allogeneic transfusion. In some embodiments, erythroid cells are cultured. In an embodiment an erythroid cell is an enucleated red blood cell.

[0158] As used herein, the term “exogenous,” when used in the context of nucleic acid, includes a transgene and recombinant nucleic acids.

[0159] As used herein, the term “exogenous nucleic acid” refers to a nucleic acid (e.g., a gene) which is not native to a cell, but which is introduced into the cell or a progenitor of the cell. An exogenous nucleic acid may include a region or open reading frame (e.g., a gene) that is homologous to, or identical to, an endogenous nucleic acid native to the cell. In some embodiments, the exogenous nucleic acid comprises RNA. In some embodiments, the exogenous nucleic acid comprises DNA. In some embodiments, the exogenous nucleic acid is integrated into the genome of the cell. In some embodiments, the exogenous nucleic acid is processed by the cellular machinery to produce an exogenous polypeptide. In some embodiments, the exogenous nucleic acid is not retained by the cell or by a cell that is the progeny of the cell into which the exogenous nucleic acid was introduced.

[0160] As used herein, the term “exogenous polypeptide” refers to a polypeptide that is not produced by a wild-type cell of that type or is present at a lower level in a wild-type cell than in a cell containing the exogenous polypeptide. In some embodiments, an exogenous polypeptide refers to a polypeptide that is introduced into or onto a cell, or is caused to be expressed by the cell by introducing an exogenous nucleic acid encoding the exogenous polypeptide into the cell or into a progenitor of the cell. In some embodiments, an exogenous polypeptide is a polypeptide encoded by an exogenous nucleic acid that was introduced into the cell or a progenitor of the cell, which nucleic acid is optionally not retained by the cell. In some embodiments, an exogenous polypeptide is a polypeptide conjugated to the surface of the cell by chemical or enzymatic means.

[0161] As used herein, the term “express” or “expression” refers to the process to produce a polypeptide, including transcription and translation. Expression may be, e.g., increased by a number of approaches, including: increasing the number of genes encoding the polypeptide, increasing the transcription of the gene (such as by placing the gene under the control of a constitutive promoter), increasing the translation of the gene, knocking out of a competitive gene, or a combination of these and/or other approaches.

[0162] As used herein, the terms “first”, “second”, and “third”, etc., with respect to exogenous polypeptides or nucleic acids are used for convenience of distinguishing when there is more than one type of exogenous polypeptide or nucleic acid. Use of these terms is not intended to confer a specific order or orientation of the exogenous polypeptides or nucleic acid unless explicitly so stated.

[0163] The term “flow cytometry” as used herein refers to a tool for interrogating the phenotype and characteristics of cells. It senses cells or particles as they move in a liquid stream through a laser (light amplification by stimulated emission of radiation)/light beam past a sensing area. The relative light-scattering and color-discriminated fluorescence of the microscopic particles is measured. Flow Analysis and differentiation of the cells is based on size, granularity, and whether the cells are carrying fluorescent molecules in the form of either antibodies or dyes. As the cell passes through the laser beam, light is scattered in all directions, and the light scattered in the forward direction at low angles)(0.5-10° from the axis is proportional to the square of the radius of a sphere and so to the size of the cell or particle. Light may enter the cell; thus, the 90° light (right-angled, side) scatter may be labeled with fluorochrome-linked antibodies or stained with fluorescent membrane, cytoplasmic, or nuclear dyes. Thus, the differentiation of cell types, the presence of membrane receptors and antigens, membrane potential, pH, enzyme activity, and DNA content may be facilitated. Flow cytometers are multiparameter, recording several measurements on each cell; therefore, it is possible to identify a homogeneous subpopulation within a heterogeneous population (Marion G. Macey, Flow cytometry: principles and applications, Humana Press, 2007). Fluorescence-activated cell sorting (FACS), which allows isolation of distinct cell populations too similar in physical characteristics to be separated by size or density, uses fluorescent tags to detect surface proteins that are differentially expressed, allowing fine distinctions to be made among physically homogeneous populations of cells.

[0164] As used herein, the term “gene” is used broadly to refer to any segment of nucleic acid associated with expression of a given RNA or protein. Thus, genes include regions encoding expressed RNAs (which typically include polypeptide coding sequences) and, often, the regulatory sequences required for their expression. Genes can be obtained from a variety of sources, including cloning from a source of interest or synthesizing from known or predicted sequence information, and may include sequences designed to have specifically desired parameters.

[0165] As used herein, the terms “activate,” “stimulate,” “enhance” “increase” and/or “induce” (and like terms) are used interchangeably to generally refer to the act of improving or increasing, either directly or indirectly, a concentration, level, function, activity, or behavior relative to the natural, expected, or average, or relative to a control condition. “Activate” refers to a primary response induced by ligation of a cell surface moiety. For example, in the context of receptors, such stimulation entails the ligation of a receptor and a subsequent signal transduction event. With respect to stimulation of a T cell, such stimulation refers to the ligation of a T cell surface moiety that in some embodiments subsequently induces a signal transduction event, such as binding the TCR/CD3 complex. Further, the stimulation event may activate a cell and upregulate or downregulate expression or secretion of a molecule. Thus, ligation of cell surface moieties, even in the absence of a direct signal transduction event, may result in the reorganization of cytoskeletal structures, or in the coalescing of cell surface moieties, each of which could serve to enhance, modify, or alter subsequent cellular responses. “Activation” includes activation of CD8+ T cells, activation of CD4+ T cells, stimulation of cytotoxic activity of T cells, stimulation of cytokine secretion by T cells, detectable effector functions, modification of the differentiation state of a T cell (e.g. promote expansion and differentiation from T effector to T memory cell), and/or any combination thereof. The term “activated T cells” refers to, among other things, T cells that are undergoing cell division.

[0166] As used herein, “altered immune response” refers to changing the form or character of the immune response, for example stimulation or inhibition of the immune response, e.g., as measured by ELISPOT assay (cellular immune response), ICS (intracellular cytokine staining assay) and major histocompatibility complex (MHC) tetramer assay to detect and quantify antigen-specific T cells, quantifying the blood population of antigen-specific CD4+ T cells, or quantifying the blood population of antigen specific CD8+ T cells by a measurable amount, or where the increase is by at least 10%, at least 20%, at least 30%, at least 40%, at least 50%, at least 60%, at least 70%, at least 80%, at least 90%, at least 95%, at least 96%, at least 97%, at least 98%, at least 99%, at least 100%, when compared to a suitable control (e.g., a control composition where dendritic cells are not loaded with tumor-specific cells, or not loaded with peptide derived from tumor-specific cells).

[0167] As used herein, polypeptides referred to herein as “recombinant” refer to polypeptides which have been produced by recombinant DNA methodology, including those that are generated by procedures which rely upon a method of artificial recombination, such as the polymerase chain reaction (PCR) and/or cloning into a vector using restriction enzymes.

[0168] As used herein, a “single-chain antibody (scFv)” refers to an antibody in which a V_{L} and a V_{H} region are joined via a linker (e.g., a synthetic sequence of amino acid residues) to form a continuous protein chain. The linker is long enough to allow the protein chain to fold back on itself and form a monovalent antigen binding site (see, e.g., Bird et al., 1988, Science 242:423-26 and Huston et al., 1988, Proc. Natl. Acad. Sci. USA 85:5879-83).

[0169] The term “specifically binds,” as used herein refers to the ability of a polypeptide or polypeptide complex to recognize and bind to a ligand in vitro or in vivo while not substantially recognizing or binding to other molecules in the surrounding milieu. In some embodiments, specific binding can be characterized by an equilibrium dissociation constant of at least about 1×10⁶M or less (e.g., a smaller equilibrium dissociation constant denotes tighter binding). Methods for determining whether two molecules specifically bind are well known in the art and include, for example, equilibrium dialysis, surface plasmon resonance, and the like.

[0170] As used herein, the terms “subject,” “individual,” “host,” and “patient,” are used interchangeably herein and refer to any mammalian subject for whom diagnosis, treatment, or therapy is desired, particularly humans. The methods described herein are applicable to both human therapy and veterinary applications. In some embodiments, the subject is a mammal, and in particular embodiments the subject is a human.

[0171] As used herein, the phrase “subject in need” refers to a subject that (i) will be administered an aAPC (or pharmaceutical composition comprising an aAPC) according to the described invention, (ii) is receiving an aAPC (or pharmaceutical composition comprising an aAPC) according to the described invention; or (iii) has received an aAPC (or pharmaceutical composition comprising an aAPC) according to the described invention, unless the context and usage of the phrase indicates otherwise

[0172] As used herein, the term “suppress,” “decrease,” “interfere,” “inhibit” and/or “reduce” (and like terms) generally refers to the act of reducing, either directly or indirectly, a concentration, level, function, activity, or behavior relative to the natural, expected, or average, or relative to a control condition.

[0173] As used herein, the terms “suppressing immune cells” or “inhibiting immune cells” refer to a process (e.g., a signaling event) causing or resulting in the inhibition or suppression of one or more cellular responses or activities of an immune cell, selected from: proliferation, differentiation, cytokine secretion, cytotoxic effector molecule release, cytotoxic activity, and expression of activation markers, or resulting in anergizing of an immune cell or induction of apoptosis of an immune cell. Suitable assays to measure immune cell inhibition or suppression are known in the art and are described herein.

[0174] As used herein, the term “pharmaceutically acceptable carrier” includes any of the standard pharmaceutical carriers, such as a phosphate buffered saline solution, water, emulsions such as an oil/water or water/oil, and various types of wetting agents. The term also encompasses any of the agents approved by a regulatory agency of the US Federal government or listed in the US Pharmacopeia for use in animals, including humans, as well as any carrier or diluent that does not cause significant irritation to a subject and does not abrogate the biological activity and properties of the administered compound.

[0175] As used herein, the terms “therapeutic amount”, “therapeutically effective amount”, an “amount effective”, or “pharmaceutically effective amount” of an active agent (e.g. an aAPC as described herein) are used interchangeably to refer to an amount that is sufficient to provide the intended benefit of treatment. However, dosage levels are based on a variety of factors, including the type of injury, the age, weight, sex, medical condition of the patient, the severity of the condition, the route of administration, and the particular active agent employed. Thus the dosage regimen may vary widely, but can be determined routinely by a physician using standard methods. Additionally, the terms “therapeutic amount”, “therapeutically effective amounts” and “pharmaceutically effective amounts” include prophylactic or preventative amounts of the compositions of the described invention. In prophylactic or preventative applications of the described invention, pharmaceutical compositions or medicaments are administered to a patient susceptible to, or otherwise at risk of, a disease, disorder or condition in an amount sufficient to eliminate or reduce the risk, lessen the severity, or delay the onset of the disease, disorder or condition, including biochemical, histologic and/or behavioral symptoms of the disease, disorder or condition, its complications, and intermediate pathological phenotypes presenting during development of the disease, disorder or condition. It is generally preferred that a maximum dose be used, that is, the highest safe dose according to some medical judgment. The terms “dose” and “dosage” are used interchangeably herein.

[0176] As used herein the term “therapeutic effect” refers to a consequence of treatment, the results of which are judged to be desirable and beneficial. A therapeutic effect can include, directly or indirectly, the arrest, reduction, or elimination of a disease manifestation. A therapeutic effect can also include, directly or indirectly, the arrest reduction or elimination of the progression of a disease manifestation.

[0177] For any therapeutic agent described herein therapeutically effective amount may be initially determined from preliminary in vitro studies and/or animal models. A therapeutically effective dose may also be determined from human data. The applied dose may be adjusted based on the relative bioavailability and potency of the administered compound. Adjusting the dose to achieve maximal efficacy based on the methods described above and other well-known methods is within the capabilities of the ordinarily skilled artisan. General principles for determining therapeutic effectiveness, which may be found in Chapter 1 of Goodman and Gilman's The Pharmacological Basis of Therapeutics, 10th Edition, McGraw-Hill (New York) (2001), incorporated herein by reference, are summarized below.

[0178] Pharmacokinetic principles provide a basis for modifying a dosage regimen to obtain a desired degree of therapeutic efficacy with a minimum of unacceptable adverse effects. In situations where the drug's plasma concentration can be measured and related to therapeutic window, additional guidance for dosage modification can be obtained.

[0179] As used herein, the terms “treat,” “treating,” and/or “treatment” include abrogating, substantially inhibiting, slowing or reversing the progression of a condition, substantially ameliorating clinical symptoms of a condition, or substantially preventing the appearance of clinical symptoms of a condition, obtaining beneficial or desired clinical results. Treating further refers to accomplishing one or more of the following: (a) reducing the severity of the disorder; (b) limiting development of symptoms characteristic of the disorder(s) being treated; (c) limiting worsening of symptoms characteristic of the disorder(s) being treated; (d) limiting recurrence of the disorder(s) in patients that have previously had the disorder(s); and (e) limiting recurrence of symptoms in patients that were previously asymptomatic for the disorder(s).

[0180] Beneficial or desired clinical results, such as pharmacologic and/or physiologic effects include, but are not limited to, preventing the disease, disorder or condition from occurring in a subject that may be predisposed to the disease, disorder or condition but does not yet experience or exhibit symptoms of the disease (prophylactic treatment), alleviation of symptoms of the disease, disorder or condition, diminishment of extent of the disease, disorder or condition, stabilization (i.e., not worsening) of the disease, disorder or condition, preventing spread of the disease, disorder or condition, delaying or slowing of the disease, disorder or condition progression, amelioration or palliation of the disease, disorder or condition, and combinations thereof, as well as prolonging survival as compared to expected survival if not receiving treatment.

[0181] The term “exogenous antigenic polypeptide” as used herein refers to an exogenous polypeptide that is capable of inducing an immune response. An exogenous antigenic polypeptide is capable of binding to exogenous antigen-presenting polypeptide.

[0182] The term “exogenous antigen-presenting polypeptide” as used herein refers to a set of cell surface proteins that bind antigens and display them on the cell surface for recognition by the appropriate T-cells. The MHC gene family is divided into three subgroups: class I, class II, and class III. MHC class I molecules are heterodimers that consist of two polypeptide chains, an α chain and a β2-microglobulin (b2m) chain. Class I MHC molecules have β2 subunits so can only be recognized by CD8 co-receptors. MHC class II molecules are also heterodimers that consist of an α and β polypeptide chain. The subdesignation of chains as e.g., α1, α2, etc. refers to separate domains within the HLA gene. Class II MHC molecules have β1 and β2 subunits and can be recognized by CD4 co-receptors. The human MHC is also called the HLA (human leukocyte antigen) complex. In some embodiments, an “exogenous antigen-presenting polypeptide” refers to the cell surface proteins HLA-A, HLA-B, HLA-C, HLA-DRB1, HLA-DQA1, HLA-DQB1, HLA-DPA1, HLA-DPB1, that are capable of binding antigens and displaying them on the cell surface. Exogenous antigen-presenting polypeptides are described in more detail below.

[0183] The term “exogenous T cell costimulatory polypeptide” as used herein, includes a polypeptide on an antigen presenting cell (e.g., an aAPC) that specifically binds a cognate co-stimulatory molecule on a T cell (e.g., an MHC molecule, B and T lymphocyte attenuator (CD272), and a Toll like receptor), thereby providing a signal which, in addition to the primary signal provided by, for instance, binding of a TCR/CD3 complex with an MHC molecule loaded with peptide, mediates a T cell response, including, but not limited to, proliferation, activation, differentiation, and the like. A co-stimulatory polypeptide also encompasses, inter alia, an antibody that specifically binds with a co-stimulatory molecule present on a T cell. Exemplary exogenous co-stimulatory polypeptides are described in more detail below.

[0184] The term “exogenous T cell co-inhibitory polypeptide” as used herein refers to any polypeptide that suppresses a T cell, including inhibition of T cell activity, inhibition of T cell proliferation, anergizing of a T cell, or induction of apoptosis of a T cell. Exemplary exogenous co-inhibitory polypeptides are described in more detail below.

[0185] The term “exogenous metabolite-altering polypeptide” as used herein refers to any polypeptide involved in the catabolism or anabolism of a metabolite in a cell, wherein the metabolite-altering polypeptide can affect the metabolism of a T cell. Exemplary metabolite-altering polypeptides are described in more detail below.

[0186] The term “Treg costimulatory polypeptide” as used herein refers to an exogenous polypeptide that expands regulatory T-cells (Tregs). In some embodiments, a Treg costimulatory polypeptide stimulates Treg cells by stimulating at least one of three signals involved in Treg cell development. Exemplary exogenous Treg co-stimulatory polypeptides are described in more detail below.

[0187] As used herein, the terms “polypeptide”, “peptide” and “protein” are used interchangeably herein to refer to a polymer of amino acid residues. The terms apply to amino acid polymers in which one or more amino acid residue is an artificial chemical analogue of a corresponding naturally occurring amino acid, as well as to naturally occurring amino acid polymers. The essential nature of such analogues of naturally occurring amino acids is that, when incorporated into a protein, that protein is specifically reactive to antibodies elicited to the same protein but consisting entirely of naturally occurring amino acids. The terms “polypeptide”, “peptide” and “protein” also are inclusive of modifications including, but not limited to, glycosylation, lipid attachment, sulfation, gamma-carboxylation of glutamic acid residues, hydroxylation, and ADP-ribosylation. It will be appreciated, as is well known and as noted above, that polypeptides may not be entirely linear. For instance, polypeptides may be branched as a result of ubiquitination, and they may be circular, with or without branching, generally as a result of posttranslational events, including natural processing event and events brought about by human manipulation which do not occur naturally. Circular, branched and branched circular polypeptides may be synthesized by non-translation natural process and by entirely synthetic methods, as well. In some embodiments, the peptide is of any length or size.

[0188] As used herein the term “nucleic acid molecule” refers to a single or double-stranded polymer of deoxyribonucleotide or ribonucleotide bases. It includes chromosomal DNA and self-replicating plasmids, vectors, mRNA, tRNA, siRNA, etc. which may be recombinant and from which exogenous polypeptides may be expressed when the nucleic acid is introduced into a cell.

[0189] The following terms are used herein to describe the sequence relationships between two or more nucleic acids or polynucleotides: (a) “reference sequence”, (b) “comparison window”, (c) “sequence identity”, (d) “percentage of sequence identity”, and (e) “substantial identity.” (a) The term “reference sequence” refers to a sequence used as a basis for sequence comparison. A reference sequence may be a subset or the entirety of a specified sequence; for example, as a segment of a full-length cDNA or gene sequence, or the complete cDNA or gene sequence. (b) The term “comparison window” refers to a contiguous and specified segment of a polynucleotide sequence, wherein the polynucleotide sequence may be compared to a reference sequence and wherein the portion of the polynucleotide sequence in the comparison window may comprise additions or deletions (i.e., gaps) compared to the reference sequence (which does not comprise additions or deletions) for optimal alignment of the two sequences. Generally, the comparison window is at least 20 contiguous nucleotides in length, and optionally can be at least 30 contiguous nucleotides in length, at least 40 contiguous nucleotides in length, at least 50 contiguous nucleotides in length, at least 100 contiguous nucleotides in length, or longer. Those of skill in the art understand that to avoid a high similarity to a reference sequence due to inclusion of gaps in the polynucleotide sequence, a gap penalty typically is introduced and is subtracted from the number of matches. Methods of alignment of sequences for comparison are well-known in the art. Optimal alignment of sequences for comparison may be conducted by the local homology algorithm of Smith and Waterman, Adv. Appl. Math. 2:482 (1981); by the homology alignment algorithm of Needleman and Wunsch, J. Mol. Biol. 48:443 (1970); by the search for similarity method of Pearson and Lipman, Proc. Natl. Acad. Sci. 85:2444 (1988); by computerized implementations of these algorithms, including, but not limited to: CLUSTAL in the PC/Gene program by Intelligenetics, Mountain View, Calif.; GAP, BESTFIT, BLAST, FASTA, and TFASTA in the Wisconsin Genetics Software Package, Genetics Computer Group (GCG), 575 Science Dr., Madison, Wis., USA; the CLUSTAL program is well described by Higgins and Sharp, Gene 73:237-244 (1988); Higgins and Sharp, CABIOS 5:151-153 (1989); Corpet, et al., Nucleic Acids Research 16:10881-90 (1988); Huang, et al., Computer Applications in the Biosciences, 8:155-65 (1992), and Pearson, et al., Methods in Molecular Biology, 24:307-331 (1994). The BLAST family of programs, which can be used for database similarity searches, includes: BLASTN for nucleotide query sequences against nucleotide database sequences; BLASTX for nucleotide query sequences against protein database sequences; BLASTP for protein query sequences against protein database sequences; TBLASTN for protein query sequences against nucleotide database sequences; and TBLASTX for nucleotide query sequences against nucleotide database sequences. See, Current Protocols in Molecular Biology, Chapter 19, Ausubel, et al., Eds., Greene Publishing and Wiley-Interscience, New York (1995). Unless otherwise stated, sequence identity/similarity values provided herein refer to the value obtained using the BLAST 2.0 suite of programs using default parameters. Altschul et al., Nucleic Acids Res. 25:3389-3402 (1997). Software for performing BLAST analyses is publicly available, e.g., through the National Center for Biotechnology-Information. This algorithm involves first identifying high scoring sequence pairs (HSPs) by identifying short words of length W in the query sequence, which either match or satisfy some positive-valued threshold score T when aligned with a word of the same length in a database sequence. T is referred to as the neighborhood word score threshold (Altschul et al., supra). These initial neighborhood word hits act as seeds for initiating searches to find longer HSPs containing them. The word hits then are extended in both directions along each sequence for as far as the cumulative alignment score can be increased. Cumulative scores are calculated using, for nucleotide sequences, the parameters M (reward score for a pair of matching residues; always >0) and N (penalty score for mismatching residues; always <0). For amino acid sequences, a scoring matrix is used to calculate the cumulative score. Extension of the word hits in each direction are halted when: the cumulative alignment score falls off by the quantity X from its maximum achieved value; the cumulative score goes to zero or below, due to the accumulation of one or more negative-scoring residue alignments; or the end of either sequence is reached. The BLAST algorithm parameters W, T, and X determine the sensitivity and speed of the alignment. The BLASTN program (for nucleotide sequences) uses as defaults a word length (W) of 11, an expectation (E) of 10, a cutoff of 100, M=5, N=−4, and a comparison of both strands. For amino acid sequences, the BLASTP program uses as defaults a word length (W) of 3, an expectation (E) of 10, and the BLOSUM62 scoring matrix (see Henikoff & Henikoff (1989) Proc. Natl. Acad. Sci. USA 89:10915). In addition to calculating percent sequence identity, the BLAST algorithm also performs a statistical analysis of the similarity between two sequences (see, e.g., Karlin & Altschul, Proc. Natl. Acad. Sci. USA 90:5873-5787 (1993)). One measure of similarity provided by the BLAST algorithm is the smallest sum probability (P(N)), which provides an indication of the probability by which a match between two nucleotide or amino acid sequences would occur by chance. BLAST searches assume that proteins may be modeled as random sequences. However, many real proteins comprise regions of nonrandom sequences which may be homopolymeric tracts, short-period repeats, or regions enriched in one or more amino acids. Such low-complexity regions may be aligned between unrelated proteins even though other regions of the protein are entirely dissimilar A number of low-complexity filter programs may be employed to reduce such low-complexity alignments. For example, the SEG (Wooten and Federhen, Comput. Chem., 17:149-163 (1993)) and XNU (Claverie and States, Comput. Chem., 17:191-201 (1993)) low-complexity filters may be employed alone or in combination. (c) The term “sequence identity” or “identity” in the context of two nucleic acid or polypeptide sequences is used herein to refer to the residues in the two sequences that are the same when aligned for maximum correspondence over a specified comparison window. When percentage of sequence identity is used in reference to proteins it is recognized that residue positions that are not identical often differ by conservative amino acid substitutions, i.e., where amino acid residues are substituted for other amino acid residues with similar chemical properties (e.g. charge or hydrophobicity) and therefore do not change the functional properties of the molecule. Where sequences differ in conservative substitutions, the percent sequence identity may be adjusted upwards to correct for the conservative nature of the substitution. Sequences that differ by such conservative substitutions are said to have “sequence similarity” or “similarity.” Means for making this adjustment are well-known to those of skill in the art. Typically this involves scoring a conservative substitution as a partial rather than a full mismatch, thereby increasing the percentage sequence identity. Thus, for example, where an identical amino acid is given a score of 1 and a non-conservative substitution is given a score of zero, a conservative substitution is given a score between zero and 1. The scoring of conservative substitutions is calculated, e.g., according to the algorithm of Meyers and Miller, Computer Applic. Biol. Sci., 4:11-17 (1988) e.g., as implemented in the program PC/GENE (Intelligenetics, Mountain View, Calif., USA). (d) The term “percentage of sequence identity” is used herein mean the value determined by comparing two optimally aligned sequences over a comparison window, wherein the portion of the polynucleotide sequence in the comparison window may comprise additions or deletions (i.e., gaps) as compared to the reference sequence (which does not comprise additions or deletions) for optimal alignment of the two sequences. The percentage is calculated by determining the number of positions at which the identical nucleic acid base or amino acid residue occurs in both sequences to yield the number of matched positions, dividing the number of matched positions by the total number of positions in the window of comparison, and multiplying the result by 100 to yield the percentage of sequence identity. (e) The term “substantial identity” of polynucleotide sequences means that a polynucleotide comprises a sequence that has at least 70% sequence identity, at least 80% sequence identity, at least 90% sequence identity and at least 95% sequence identity, compared to a reference sequence using one of the alignment programs described using standard parameters. One of skill will recognize that these values may be adjusted appropriately to determine corresponding identity of proteins encoded by two nucleotide sequences by taking into account codon degeneracy, amino acid similarity, reading frame positioning and the like. Substantial identity of amino acid sequences for these purposes normally means sequence identity of at least 60%, or at least 70%, at least 80%, at least 90%, or at least 95%. Another indication that nucleotide sequences are substantially identical is if two molecules hybridize to each other under stringent conditions. However, nucleic acids that do not hybridize to each other under stringent conditions are still substantially identical if the polypeptides that they encode are substantially identical. This may occur, e.g., when a copy of a nucleic acid is created using the maximum codon degeneracy permitted by the genetic code. One indication that two nucleic acid sequences are substantially identical is that the polypeptide that the first nucleic acid encodes is immunologically cross reactive with the polypeptide encoded by the second nucleic acid. Mutations may also be made to the nucleotide sequences of the present proteins by reference to the genetic code, including taking into account codon degeneracy.

[0190] As used herein, the term “variant” refers to a polypeptide which differs from the original protein by one or more amino acid substitutions, deletions, insertions, or other modifications. These modifications do not significantly change the biological activity of the original protein. In many cases, a variant retains at least 10%, 20%, 30%, 40%, 50%, 60%, 70%, 80%, 90%, 95%, or 100% of the biological activity of original protein. The biological activity of a variant can also be higher than that of the original protein. A variant can be naturally-occurring, such as by allelic variation or polymorphism, or be deliberately engineered.

[0191] The amino acid sequence of a variant is substantially identical to that of the original protein. In many embodiments, a variant shares at least 50%, 60%, 70%, 75%, 80%, 85%, 90%, 91%, 92%, 93%, 94%, 95%, 96%, 97%, 98%, or 99%, or more global sequence identity or similarity with the original protein. Sequence identity or similarity can be determined using various methods known in the art, such as Basic Local Alignment Tool (BLAST), dot matrix analysis, or the dynamic programming method. In one example, the sequence identity or similarity is determined by using the Genetics Computer Group (GCG) programs GAP (Needleman-Wunsch algorithm) The amino acid sequences of a variant and the original protein can be substantially identical in one or more regions, but divergent in other regions. A variant may include a fragment (e.g., a biologically active fragment of a polypeptide). In some embodiments, a fragment may lack up to about 1, 2, 3, 4, 5, 10, 20, 30, 40, 50, or 100 amino acid residues on the N-terminus, C-terminus, or both ends (each independently) of a polypeptide, as compared to the full-length polypeptide.

### I. Cells of the Immune System

[0192] There are a large number of cellular interactions that comprise the immune system. These interactions occur through specific receptor-ligand pairs that signal in both directions so that each cell receives instructions based on the temporal and spatial distribution of those signals.

[0193] Murine models have been highly useful in discovering immunomodulatory pathways, but clinical utility of these pathways does not always translate from an inbred mouse strain to an outbred human population, since an outbred human population may have individuals that rely to varying extents on individual immunomodulatory pathways.

[0194] Cells of the immune system include lymphocytes, monocytes/macrophages, dendritic cells, the closely related Langerhans cells, natural killer (NK) cells, mast cells, basophils, and other members of the myeloid lineage of cells. In addition, a series of specialized epithelial and stromal cells provide the anatomic environment in which immunity occurs, often by secreting critical factors that regulate growth and/or gene activation in cells of the immune system, which also play direct roles in the induction and effector phases of the response. (Paul, W. E., “Chapter 1: The immune system: an introduction,” Fundamental Immunology, 4th Edition, Ed. Paul, W. E., Lippicott-Raven Publishers, Philadelphia, (1999), at p. 102).

[0195] The cells of the immune system are found in peripheral organized tissues, such as the spleen, lymph nodes, Peyer's patches of the intestine and tonsils. Lymphocytes also are found in the central lymphoid organs, the thymus, and bone marrow where they undergo developmental steps that equip them to mediate the myriad responses of the mature immune system. A substantial portion of lymphocytes and macrophages comprise a recirculating pool of cells found in the blood and lymph, providing the means to deliver immunocompetent cells to sites where they are needed and to allow immunity that is generated locally to become generalized. (Paul, W. E., “Chapter 1: The immune system: an introduction,” Fundamental Immunology, 4th Edition, Ed. Paul, W. E., Lippicott-Raven Publishers, Philadelphia, (1999), at p. 102).

[0196] The term “lymphocyte” refers to a small white blood cell formed in lymphatic tissue throughout the body and in normal adults making up about 22-28% of the total number of leukocytes in the circulating blood that plays a large role in defending the body against disease. Individual lymphocytes are specialized in that they are committed to respond to a limited set of structurally related antigens through recombination of their genetic material (e.g. to create a T cell receptor and a B cell receptor). This commitment, which exists before the first contact of the immune system with a given antigen, is expressed by the presence of receptors specific for determinants (epitopes) on the antigen on the lymphocyte's surface membrane. Each lymphocyte possesses a unique population of receptors, all of which have identical combining sites. One set, or clone, of lymphocytes differs from another clone in the structure of the combining region of its receptors and thus differs in the epitopes that it can recognize. Lymphocytes differ from each other not only in the specificity of their receptors, but also in their functions. (Paul, W. E., “Chapter 1: The immune system: an introduction,” Fundamental Immunology, 4th Edition, Ed. Paul, W. E., Lippicott-Raven Publishers, Philadelphia, (1999), at p. 102).

[0197] Two broad classes of lymphocytes are recognized: the B-lymphocytes (B-cells), which are precursors of antibody-secreting cells, and T-lymphocytes (T-cells).

### B-Lymphocytes

[0198] B-lymphocytes are derived from hematopoietic cells of the bone marrow. A mature B-cell can be activated with an antigen that expresses epitopes that are recognized by its cell surface. The activation process may be direct, dependent on cross-linkage of membrane Ig molecules by the antigen (cross-linkage-dependent B-cell activation), or indirect, via interaction with a helper T-cell, in a process referred to as cognate help. In many physiological situations, receptor cross-linkage stimuli and cognate help synergize to yield more vigorous B-cell responses (Paul, W. E., “Chapter 1: The immune system: an introduction,” Fundamental Immunology, 4th Edition, Ed. Paul, W. E., Lippicott-Raven Publishers, Philadelphia, (1999)).

[0199] Cross-linkage dependent B-cell activation requires that the antigen express multiple copies of the epitope complementary to the binding site of the cell surface receptors, because each B-cell expresses Ig molecules with identical variable regions. Such a requirement is fulfilled by other antigens with repetitive epitopes, such as capsular polysaccharides of microorganisms or viral envelope proteins. Cross-linkage-dependent B-cell activation is a major protective immune response mounted against these microbes (Paul, W. E., “Chapter 1: The immune system: an introduction”, Fundamental Immunology, 4th Edition, Ed. Paul, W. E., Lippicott-Raven Publishers, Philadelphia, (1999)).

[0200] Cognate help allows B-cells to mount responses against antigens that cannot cross-link receptors and, at the same time, provides costimulatory signals that rescue B cells from inactivation when they are stimulated by weak cross-linkage events. Cognate help is dependent on the binding of antigen by the B-cell's membrane immunoglobulin (Ig), the endocytosis of the antigen, and its fragmentation into peptides within the endosomal/lysosomal compartment of the cell. Some of the resultant peptides are loaded into a groove in a specialized set of cell surface proteins known as class II major histocompatibility complex (MHC) molecules. The resultant class II/peptide complexes are expressed on the cell surface and act as ligands for the antigen-specific receptors of a set of T-cells designated as CD4⁺ T-cells. The CD4⁺ T-cells bear receptors on their surface specific for the B-cell's class II/peptide complex. B-cell activation depends not only on the binding of the T cell through its T cell receptor (TCR), but this interaction also allows an activation ligand on the T-cell (CD40 ligand) to bind to its receptor on the B-cell (CD40) signaling B-cell activation. In addition, T helper cells secrete several cytokines that regulate the growth and differentiation of the stimulated B-cell by binding to cytokine receptors on the B cell (Paul, W. E., “Chapter 1: The immune system: an introduction, “Fundamental Immunology, 4th Edition, Ed. Paul, W. E., Lippicott-Raven Publishers, Philadelphia, (1999)).

[0201] During cognate help for antibody production, the CD40 ligand is transiently expressed on activated CD4⁺ T helper cells, and it binds to CD40 on the antigen-specific B cells, thereby transducing a second costimulatory signal. The latter signal is essential for B cell growth and differentiation and for the generation of memory B cells by preventing apoptosis of germinal center B cells that have encountered antigen. Hyperexpression of the CD40 ligand in both B and T cells is implicated in pathogenic autoantibody production in human SLE patients (Desai-Mehta, A. et al., “Hyperexpression of CD40 ligand by B and T cells in human lupus and its role in pathogenic autoantibody production,” J. Clin. Invest. Vol. 97(9), 2063-2073, (1996)).

### T-Lymphocytes

[0202] T-lymphocytes derived from precursors in hematopoietic tissue, undergo differentiation in the thymus, and are then seeded to peripheral lymphoid tissue and to the recirculating pool of lymphocytes. T-lymphocytes or T cells mediate a wide range of immunologic functions. These include the capacity to help B cells develop into antibody-producing cells, the capacity to increase the microbicidal action of monocytes/macrophages, the inhibition of certain types of immune responses, direct killing of target cells, and mobilization of the inflammatory response. These effects depend on T cell expression of specific cell surface molecules and the secretion of cytokines (Paul, W. E., “Chapter 1: The immune system: an introduction”, Fundamental Immunology, 4th Edition, Ed. Paul, W. E., Lippicott-Raven Publishers, Philadelphia, (1999)).

[0203] T cells differ from B cells in their mechanism of antigen recognition. Immunoglobulin, the B cell's receptor, binds to individual epitopes on soluble molecules or on particulate surfaces. B-cell receptors see epitopes expressed on the surface of native molecules. While antibody and B-cell receptors evolved to bind to and to protect against microorganisms in extracellular fluids, T cells recognize antigens on the surface of other cells and mediate their functions by interacting with, and altering, the behavior of these antigen-presenting cells (APCs). There are three main types of APCs in peripheral lymphoid organs that can activate T cells: dendritic cells, macrophages and B cells. The most potent of these are the dendritic cells, whose only function is to present foreign antigens to T cells. Immature dendritic cells are located in tissues throughout the body, including the skin, gut, and respiratory tract. When they encounter invading microbes at these sites, they endocytose the pathogens and their products, and carry them via the lymph to local lymph nodes or gut associated lymphoid organs. The encounter with a pathogen induces the dendritic cell to mature from an antigen-capturing cell to an APC that can activate T cells. APCs display three types of protein molecules on their surface that have a role in activating a T cell to become an effector cell: (1) MHC proteins, which present foreign antigen to the T cell receptor; (2) costimulatory proteins which bind to complementary receptors on the T cell surface; and (3) cell-cell adhesion molecules, which enable a T cell to bind to the APC for long enough to become activated (“Chapter 24: The adaptive immune system,” Molecular Biology of the Cell, Alberts, B. et al., Garland Science, NY, (2002)).

[0204] T-cells are subdivided into two distinct classes based on the cell surface receptors they express. The majority of T cells express T cell receptors (TCR) consisting of α and β-chains. A small group of T cells express receptors made of γ and δ chains. Among the α/β T cells are two sub-lineages: those that express the coreceptor molecule CD4 (CD4⁺ T cells); and those that express CD8 (CD8⁺ T cells). These cells differ in how they recognize antigen and in their effector and regulatory functions.

[0205] CD4⁺ T cells are the major regulatory cells of the immune system. Their regulatory function depends both on the expression of their cell-surface molecules, such as CD40 ligand whose expression is induced when the T cells are activated, and the wide array of cytokines they secrete when activated.

[0206] T cells also mediate important effector functions, some of which are determined by the patterns of cytokines they secrete. The cytokines can be directly toxic to target cells and can mobilize potent inflammatory mechanisms.

[0207] In addition, T cells, particularly CD8⁺ T cells, can develop into cytotoxic T-lymphocytes (CTLs) capable of efficiently lysing target cells that express antigens recognized by the CTLs (Paul, W. E., “Chapter 1: The immune system: an introduction,” Fundamental Immunology, 4th Edition, Ed. Paul, W. E., Lippicott-Raven Publishers, Philadelphia, (1999)).

[0208] T cell receptors (TCRs) recognize a complex consisting of a peptide derived by proteolysis of the antigen bound to a specialized groove of a class II or class I MHC protein. CD4⁺ T cells recognize only peptide/class II complexes while CD8⁺ T cells recognize peptide/class I complexes (Paul, W. E., “Chapter 1: The immune system: an introduction,” Fundamental Immunology, 4th Edition, Ed. Paul, W. E., Lippicott-Raven Publishers, Philadelphia, (1999)).

[0209] The TCR's ligand (i.e., the peptide/MHC protein complex) is created within APCs. In general, class II MHC molecules bind peptides derived from proteins that have been taken up by the APC through an endocytic process. These peptide-loaded class II molecules are then expressed on the surface of the cell, where they are available to be bound by CD4⁺ T cells with TCRs capable of recognizing the expressed cell surface complex. Thus, CD4⁺ T cells are specialized to react with antigens derived from extracellular sources (Paul, W. E., “Chapter 1: The immune system: an introduction,” Fundamental Immunology, 4th Edition, Ed. Paul, W. E., Lippicott-Raven Publishers, Philadelphia, (1999)).

[0210] In contrast, class I MHC molecules are mainly loaded with peptides derived from internally synthesized proteins, such as viral proteins. These peptides are produced from cytosolic proteins by proteolysis by the proteosome and are translocated into the rough endoplasmic reticulum. Such peptides, generally composed of nine amino acids in length, are bound into the class I MHC molecules and are brought to the cell surface, where they can be recognized by CD8⁺ T cells expressing appropriate receptors. This gives the T cell system, particularly CD8⁺ T cells, the ability to detect cells expressing proteins that are different from, or produced in much larger amounts than, those of cells of the remainder of the organism (e.g., viral antigens) or mutant antigens (such as active oncogene products), even if these proteins in their intact form are neither expressed on the cell surface nor secreted (Paul, W. E., “Chapter 1: The immune system: an introduction,” Fundamental Immunology, 4th Edition, Ed. Paul, W. E., Lippicott-Raven Publishers, Philadelphia, (1999)).

[0211] T cells can also be classified based on their function as helper T cells; T cells involved in inducing cellular immunity; suppressor T cells; and cytotoxic T cells.

### Helper T Cells

[0212] Helper T cells are T cells that stimulate B cells to make antibody responses to proteins and other T cell-dependent antigens. T cell-dependent antigens are immunogens in which individual epitopes appear only once or a limited number of times such that they are unable to cross-link the membrane immunoglobulin (Ig) of B cells or do so inefficiently. B cells bind the antigen through their membrane Ig, and the complex undergoes endocytosis. Within the endosomal and lysosomal compartments, the antigen is fragmented into peptides by proteolytic enzymes, and one or more of the generated peptides are loaded into class II MHC molecules, which traffic through this vesicular compartment. The resulting peptide/class II MHC complex is then exported to the B-cell surface membrane. T cells with receptors specific for the peptide/class II molecular complex recognize this complex on the B-cell surface. (Paul, W. E., “Chapter 1: The immune system: an introduction,” Fundamental Immunology, 4th Edition, Ed. Paul, W. E., Lippicott-Raven Publishers, Philadelphia (1999)).

[0213] B-cell activation depends both on the binding of the T cell through its TCR and on the interaction of the T-cell CD40 ligand (CD40L) with CD40 on the B cell. T cells do not constitutively express CD40L. Rather, CD40L expression is induced as a result of an interaction with an APC that expresses both a cognate antigen recognized by the TCR of the T cell and CD80 or CD86. CD80/CD86 is generally expressed by activated, but not resting, B cells so that the helper interaction involving an activated B cell and a T cell can lead to efficient antibody production. In many cases, however, the initial induction of CD40L on T cells is dependent on their recognition of antigen on the surface of APCs that constitutively express CD80/86, such as dendritic cells. Such activated helper T cells can then efficiently interact with and help B cells. Cross-linkage of membrane Ig on the B cell, even if inefficient, may synergize with the CD40L/CD40 interaction to yield vigorous B-cell activation. The subsequent events in the B-cell response, including proliferation, Ig secretion, and class switching of the Ig class being expressed, either depend or are enhanced by the actions of T cell-derived cytokines (Paul, W. E., “Chapter 1: The immune system: an introduction,” Fundamental Immunology, 4th Edition, Ed. Paul, W. E., Lippicott-Raven Publishers, Philadelphia, (1999)).

[0214] CD4⁺ T cells tend to differentiate into cells that principally secrete the cytokines IL-4, IL-5, IL-6, and IL-10 (T_{H}2 cells) or into cells that mainly produce IL-2, IFN-γ, and lymphotoxin (T_{H}1 cells). The T_{H}2 cells are very effective in helping B-cells develop into antibody-producing cells, whereas the T_{H}1 cells are effective inducers of cellular immune responses, involving enhancement of microbicidal activity of monocytes and macrophages, and consequent increased efficiency in lysing microorganisms in intracellular vesicular compartments. Although CD4⁺ T cells with the phenotype of T_{H}2 cells (i.e., IL-4, IL-5, IL-6 and IL-10) are efficient helper cells, T_{H}1 cells also have the capacity to be helpers (Paul, W. E., “Chapter 1: The immune system: an introduction, “Fundamental Immunology, 4th Edition, Ed. Paul, W. E., Lippicott-Raven Publishers, Philadelphia, (1999)).

### T Cell Involvement in Cellular Immunity Induction

[0215] T cells also may act to enhance the capacity of monocytes and macrophages to destroy intracellular microorganisms. In particular, interferon-gamma (IFN-γ) produced by helper T cells enhances several mechanisms through which mononuclear phagocytes destroy intracellular bacteria and parasitism including the generation of nitric oxide and induction of tumor necrosis factor (TNF) production. T_{H1} cells are effective in enhancing the microbicidal action, because they produce IFN-γ. In contrast, two of the major cytokines produced by T_{H2} cells, IL-4 and IL-10, block these activities (Paul, W. E., “Chapter 1: The immune system: an introduction,” Fundamental Immunology, 4th Edition, Ed. Paul, W. E., Lippicott-Raven Publishers, Philadelphia, (1999)).

### Regulatory T (Treg) Cells

[0216] Immune homeostasis is maintained by a controlled balance between initiation and downregulation of the immune response. The mechanisms of both apoptosis and T cell anergy (a tolerance mechanism in which the T cells are intrinsically functionally inactivated following an antigen encounter (Scwartz, R. H., “T cell anergy”, Annu. Rev. Immunol., Vol. 21: 305-334 (2003)) contribute to the downregulation of the immune response. A third mechanism is provided by active suppression of activated T cells by suppressor or regulatory CD4⁺ T (Treg) cells (Reviewed in Kronenberg, M. et al., “Regulation of immunity by self-reactive T cells”, Nature, Vol. 435: 598-604 (2005)). CD4⁺ Tregs that constitutively express the IL-2 receptor alpha (IL-2Rα) chain (CD4⁺ CD25⁺) are a naturally occurring T cell subset that are anergic and suppressive (Taams, L. S. et al., “Human anergic/suppressive CD4⁺ CD25⁺ T cells: a highly differentiated and apoptosis-prone population”, Eur. J. Immunol. Vol. 31: 1122-1131 (2001)). Depletion of CD4⁺ CD25⁺ Tregs results in systemic autoimmune disease in mice. Furthermore, transfer of these Tregs prevents development of autoimmune disease. Human CD4⁺ CD25⁺ Tregs, similar to their murine counterpart, are generated in the thymus and are characterized by the ability to suppress proliferation of responder T cells through a cell-cell contact-dependent mechanism, the inability to produce IL-2, and the anergic phenotype in vitro. Human CD4⁺ CD25⁺ T cells can be split into suppressive (CD25^{high}) and nonsuppressive (CD25^{low}) cells, according to the level of CD25 expression. A member of the forkhead family of transcription factors, FOXP3, has been shown to be expressed in murine and human CD4⁺ CD25⁺ Tregs and appears to be a master gene controlling CD4⁺ CD25⁺ Treg development (Battaglia, M. et al., “Rapamycin promotes expansion of functional CD4⁺ CD25⁺ Foxp3⁺ regulator T cells of both healthy subjects and type 1 diabetic patients”, J. Immunol., Vol. 177: 8338-8347, (2006)).

### Cytotoxic T Lymphocytes

[0217] CD8⁺ T cells that recognize peptides from proteins produced within the target cell have cytotoxic properties in that they lead to lysis of the target cells. The mechanism of CTL-induced lysis involves the production by the CTL of perforin, a molecule that can insert into the membrane of target cells and promote the lysis of that cell. Perforin-mediated lysis is enhanced by granzymes, a series of enzymes produced by activated CTLs. Many active CTLs also express large amounts of fas ligand on their surface. The interaction of fas ligand on the surface of CTL with fas on the surface of the target cell initiates apoptosis in the target cell, leading to the death of these cells. CTL-mediated lysis appears to be a major mechanism for the destruction of virally infected cells.

### Lymphocyte Activation

[0218] The term “activation” or “lymphocyte activation” refers to stimulation of lymphocytes by specific antigens, nonspecific mitogens, or allogeneic cells resulting in synthesis of RNA, protein and DNA and production of lymphokines; it is followed by proliferation and differentiation of various effector and memory cells. T-cell activation is dependent on the interaction of the TCR/CD3 complex with its cognate ligand, a peptide bound in the groove of a class I or class II MHC molecule. The molecular events set in motion by receptor engagement are complex. Among the earliest steps appears to be the activation of tyrosine kinases leading to the tyrosine phosphorylation of a set of substrates that control several signaling pathways. These include a set of adapter proteins that link the TCR to the ras pathway, phospholipase Cγ1, the tyrosine phosphorylation of which increases its catalytic activity and engages the inositol phospholipid metabolic pathway, leading to elevation of intracellular free calcium concentration and activation of protein kinase C, and a series of other enzymes that control cellular growth and differentiation. Full responsiveness of a T cell requires, in addition to receptor engagement, an accessory cell-delivered costimulatory activity, e.g., engagement of CD28 on the T cell by CD80 and/or CD86 on the APC.

### T-Memory Cells

[0219] Following the recognition and eradication of pathogens through adaptive immune responses, the vast majority (90-95%) of T cells undergo apoptosis with the remaining cells forming a pool of memory T cells, designated central memory T cells (TCM), effector memory T cells (TEM), and resident memory T cells (TRM) (Clark, R. A., “Resident memory T cells in human health and disease”, Sci. Transl. Med., 7, 269rv1, (2015)). CD45RA is expressed on naïve T cells, as well as the effector cells in both CD4 and CD8. After antigen experience, central and effector memory T cells gain expression of CD45RO and lose expression of CD45RA. Thus either CD45RA or CD45RO is used to generally differentiate the naïve from memory populations. CCR7 and CD62L are two other markers that can be used to distinguish central and effector memory T cells. Naïve and central memory cells express CCR7 and CD62L in order to migrate to secondary lymphoid organs. Thus, naïve T cells are CD45RA+CD45RO−CCR7+CD62L+, central memory T cells are CD45RA−CD45RO+CCR7+CD62L+, and effector memory T cells are CD45RA−CD45RO+CCR7−CD62L−.

[0220] Compared to standard T cells, these memory T cells are long-lived with distinct phenotypes such as expression of specific surface markers, rapid production of different cytokine profiles, capability of direct effector cell function, and unique homing distribution patterns. Memory T cells exhibit quick reactions upon re-exposure to their respective antigens in order to eliminate the reinfection of the offender and thereby restore balance of the immune system rapidly. Increasing evidence substantiates that autoimmune memory T cells hinder most attempts to treat or cure autoimmune diseases (Clark, R. A., “Resident memory T cells in human health and disease”, Sci. Transl. Med., Vol. 7, 269rv1, (2015)).

II. Artificial Antigen Presenting Cells (aAPCs)

[0221] The present disclosure features erythroid cells (e.g., enucleated erythroid cells) and enucleated cells that are engineered to activate or suppress T cells. In some embodiments an enucleated cell is an erythroid cell, for example, that has lost its nucleus through differentiation from an erythrocyte precursor cell. It will be understood, however, that not all enucleated cells are erythroid cells and, accordingly, enucleated cells encompassed herein can also include, e.g., platelets. In some embodiments, enucleated cells are not platelets and are therefore platelet free enucleated cells. In certain aspects of the disclosure, the enucleated cell is a reticulocyte or erythrocyte (fully mature red blood cell (RBC)). Erythrocytes offer a number of advantages over other cells, including being non-autologous (e.g., substantially lack major histocompatibility complex (MHC)), having longer circulation time in a subject (e.g. greater than 30 days), and being amenable to production in large numbers.

[0222] The skilled artisan would appreciate, based upon the disclosure provided herein, that numerous immunoregulatory molecules can be used to produce an almost limitless variety of aAPCs once armed with the teachings provided herein. That is, there is extensive knowledge in the art regarding the events and molecules involved in activation and induction of T cells.

[0223] In some aspects, the present disclosure provides an engineered erythroid cell or an enucleated cell comprising an exogenous polypeptide, e.g., comprising or presenting the exogenous polypeptide on the cell surface. Exogenous polypeptides of the present disclosure include, but are not limited to, exogenous antigenic polypeptides, exogenous antigen-presenting polypeptides, exogenous costimulatory polypeptides, exogenous coinhibitory polypeptides, exogenous metabolic modulating polypeptides, and exogenous Treg costimulatory polypeptides.

### Exogenous Antigenic Polypeptides

[0224] An exogenous antigenic polypeptide is a polypeptide that is capable of inducing an immune response. In some embodiments, an exogenous antigenic polypeptide is a polypeptide that, by inducing an immune response, inhibits a cancer, e.g., reduces or alleviates a cause or symptom of a cancer, or improves a value for a parameter associated with the cancer. In some embodiments, an exogenous antigenic polypeptide is a polypeptide that, by inducing an immune response, inhibits an infectious disease, e.g., reduces or alleviates a cause or symptom of an infectious disease, or improves a value for a parameter associated with the infectious disease. In some embodiments, an exogenous antigenic polypeptide is a polypeptide that, by inducing an immune response, inhibits an autoimmune disease, e.g., reduces or alleviates a cause or symptom of an autoimmune disease, or improves a value for a parameter associated with the autoimmune disease.

[0225] In certain embodiments, the exogenous antigenic polypeptide comprises or consist of an antigenic polypeptide selected from Table 1, or a fragment or variant thereof, or an antibody molecule thereto.

TABLE 1

| | | | | | | | | |
|---|---|---|---|---|---|---|---|---|
| | | | | | | | Lymphocyte | |
| | | | HLA Frequency | | | | Stimulation | |
| Gene/Protein | Tumor | HLA | (%) | Peptide | SEQ ID NO: | Position | Method | References |

MUTATIONS

| | | | | | | | | |
|---|---|---|---|---|---|---|---|---|
| ABL-BCR alb-b3 | | A2 | | FVEHDDESPGL | 16 | | | Wagner, 2003 |
| (b2a2) | | | | | | | | |
| Mutation | | | | | | | | |
| ABL-BCR alb-b4 | | A3 | | FVEHDDESPGL | 16 | | | Wagner, 2004 |
| (b3a2) | | | | | | | | |
| Mutation | | | | | | | | |
| PPP1R3B | melanoma | A1 | 26 | YTDFHCQYV | 17 | 172-180 | autologous | Robbins, 2013 |
| | | | | | | | tumor | |
| alpha-actinin-4 | lung | A2 | 44 | FIASNGVKLV | 18 | 118-127 | autologous | Echchakir, 2001 |
| | carcinoma | | | | | | tumor cells | |
| ARTC1 | melanoma | DR1 | 18 | YSVYFNLPADTIYTNh | 19 | | autologous | Wang, 2005 |
| | | | | | | | tumor cells | |
| CASP-8 | head and neck | B35 | 20 | FPSDSWCYF | 20 | 476-484 | autologous | Mandruzzato, 1997 |
| | squamous cell | | | | | | tumor cells | |
| | carcinoma | | | | | | | |
| beta-catenin | melanoma | A24 | 20 | SYLDSGIHF | 21 | 29-37 | autologous | Robbins, 1996 |
| | | | | | | | tumor cells | |
| Cdc27 | melanoma | DR4 | 24 | FSWAMDLDPKGAe | 22 | 760-771 | autologous | Wang 1999b |
| | | | | | | | tumor cells | |
| CDK4 | melanoma | A2 | 44 | ACDPHSGHFV | 23 | 23-32 | autologous | Wolfel, 1995 |
| | | | | | | | tumor cells | |
| CDK12 | melanoma | A11 | 13 | CILGKLFTK | 24 | 924-932 | autologous | Robbins, 2013 |
| | | | | | | | tumor cells | |
| CDKN2A | melanoma | A11 | 13 | AVCPWTWLRg | 25 | 125-133 | autologous | Huang, 2004 |
| | | | | | | (p14ARF-ORF3) | tumor cells | |
| CLPP | melanoma | A2 | 44 | ILDKVLVHL | 26 | 240-248 | autologous | Corbiere, 2011 |
| | | | | | | | tumor cells | |
| COA-1 | colorectal | DR4 | 24 | TLYQDDTLTLQAAGe | 27 | 447-460 | autologous | Maccalli, 2003 |
| | | | | | | | tumor cells | |
| | carcinoma | DR13 | 19 | TLYQDDTLTLQAAGe | 27 | 447-460 | autologous | Maccalli, 2003 |
| | | | | | | | tumor cells | |
| CSNK1A1 | melanoma | A2 | 44 | GLFGDIYLA | 28 | 26-34 | autologous | Robbins, 2013 |
| | | | | | | | tumor cells | |
| EFTUD2 | melanoma | A3 | 22 | KILDAVVAQK | 29 | 668-677 | autologous | Lennerz, 2005 |
| | | | | | | | tumor cells | |
| Elongation | lung | A68 | 8 | ETVSEQSNV | 30 | 581-589 | autologous | Hogan, 1998 |
| factor 2 | squamous CC | | | | | | tumor cells | |
| FN1 | melanoma | DR2 | 25 | MIFEKHGFRRTTPP | 31 | 2050-2063 | autologous | Wang, 2002 |
| | | | | | | | tumor cells | |
| GAS7 | melanoma | A2 | 44 | SLADEAEVYL | 32 | 141-150 | autologous | Robbins, 2013 |
| | | | | | | | tumor cells | |
| GPNMB | melanoma | A3 | 22 | TLDWLLQTPK | 33 | 179-188 | autologous | Lennerz, 2005 |
| | | | | | | | tumor cells | |
| HAUS3 | melanoma | A2 | 44 | ILNAMIAKIj | 34 | 154-162 | autologous | Robbins, 2013 |
| | | | | | | | tumor cells | |
| HSDL1 | ovarian cancer | Cw14 | 4 | CYMEAVAL | 35 | 20-27 | autologous | Wick, 2013 |
| | | | | | | | tumor cells | |
| LDLR- | melanoma | DR1 | 18 | WRRAPAPGA | 36 | 315-323 | autologous | Wang, 1999a |
| fucosyltransferase | | | | PVTWRRAPA | 37 | 312-320 | tumor cells | |
| AS fusion | | | | | | | | |
| protein | | | | | | | | |
| HLA-A2d | renal cell | | | | | | autologous | Brandle, 1996 |
| | carcinoma | | | | | | tumor cells | |
| HLA-A11d | melanoma | | | | | | autologous | Huang, 2004 |
| | | | | | | | tumor cells | |
| HLA-A0201- | | A2 | | CVEWLRIYLENG | 38 | | | Novellino, L. 2004 |
| R170I | | | | | | | | |
| hsp70-2 | renal cell | A2 | 44 | SLFEGIDIYT | 39 | 286-295 | autologous | Gaudin, 1999 |
| | carcinoma | | | | | | tumor cells | |
| | bladder tumor | B44 | 21 | AEPINIQTW | 40 | 262-270 | autologous | Gueguen, 1998 |
| | | | | | | | tumor cells | |
| IgGH | | A2 | | LMISRTPEV | 41 | | | Belle S, 2008 |
| MART2 | melanoma | A1 | 26 | FLEGNEVGKTY | 42 | 446-455 | autologous | Kawakami, 2001 |
| | | | | | | | tumor cells | |
| MATN | melanoma | A11 | 13 | KTLTSVFQK | 43 | 226-234 | autologous | Robbins, 2013 |
| | | | | | | | tumor cells | |
| k-ras | non-small cell | A2 | 44 | FLDEFMEGV | 44 | 224-232 | autologous | Karanikas, 2001 |
| | lung | | | | | | tumor cells | |
| | carcinoma | A2 | | KLVVVGAVGV | 45 | | | Kubuschok, 2006 |
| | | A2 | | LVVVGAVGV | 46 | | | Kubuschok, 2006 |
| | | B35 | | VVVGAVGVG | 47 | | | Gjertsen, 1997 |
| MUM-1f | melanoma | B44 | 21 | EEKLIVVLF | 48 | 30-38 | autologous | Coulie, 1995 |
| | | | | | | | tumor cells | |
| MUM-2 | melanoma | B44 | 21 | SELFRSGLDSY | 49 | 123-133 | autologous | Chiari, 1999 |
| | | Cw6 | 18 | FRSGLDSYV | 50 | 126-134 | tumor cells | |
| MUM-3 | melanoma | A68 | 8 | EAFIQPITR | 51 | 322-330 | autologous | Baurain, 2000 |
| | | | | | | | tumor cells | |
| neo-PAP | melanoma | DR7 | 25 | RVIKNSIRLTLe | 52 | 724-734 | autologous | Topalian, 2002 |
| | | | | | | | tumor cells | |
| NFYC | lung | B52 | 5 | QQITKTEV | 53 | 275-282 | autologous | Takenoyama, 2006 |
| | squamous cell | | | | | | tumor cells | |
| | carcinoma | | | | | | | |
| OS-9 | melanoma | B44 | 21 | KELEGILLL | 54 | 438-446 | autologous | Vigneron, 2002 |
| | | | | | | | tumor cells | |
| PTPRK | melanoma | DR10 | 3 | PYYFAAELPPRNLPEE | 55 | 667-682 | autologous | Novellino, 2003 |
| | | | | | | | tumor cells | |
| N-ras | melanoma | A1 | 26 | ILDTAGREEY | 56 | 55-64 | autologous | Linard, 2002 |
| | | | | | | | tumor cells | |
| BRAF600 | melanoma | B7 | 17 | RPHVPESAF | 57 | 329-337 | autologous | Lennerz, 2005 |
| | | | | | | | tumor cells | |
| SIRT2 | melanoma | A3 | 22 | KIFSEVTLK | 58 | 192-200 | autologous | Lennerz, 2005 |
| | | | | | | | tumor cells | |
| SNRPD1 | melanoma | B38 | 5 | SHETVIIEL | 59 | 19-Nov | autologous | Lennerz, 2005 |
| | | | | | | | tumor cells | |
| Triosephosphate | melanoma | DR1 | 18 | GELIGILNAAKVPAD | 60 | 23-37 | autologous | Pieper, 1999 |
| isomerase | | | | | | | tumor cells | |
| Myosin class I | melanoma | A3 | 22 | KINKNPKYK | 61 | 911-919 | expansion of TIL | Zorn, 1999 |
| | | | | | | | with IL-2 | |
| BCR-ABL fusion | | A2 | | KLSEQESLL | 62 | | | Buzyn, 1997 |
| | | A2 | | MLTNSCVKL | 63 | | | Buzyn, 1997 |
| | | A2 | | FMVELVEGA | 64 | | | Buzyn, 1997 |
| | | A2 | | GVRGRVEEI | 65 | | | Volpe, 2007 |
| BCR-ABL fusion | chronic | A2 | 44 | SSKALQRPV | 66 | 926-934 | peptide | Yotnda, 1998a |
| protein (b3a2) | myeloid | A3 | | ATGFKQSSK | 67 | | | Greco, 1996 |
| | leukemia | A3 | | HSATGFKQSSK | 68 | | | Bocchia, 1996 |
| | | A3 | | KQSSKALQR | 69 | | | Greco, 1996 |
| | | A11 | | HSATGFKQSSK | 68 | | | Bocchia, 1996 |
| | | B8 | 14 | GFKQSSKAL | 70 | 922-930 | peptide | Yotnda, 1998a |
| | | DR4 | 24 | ATGFKQSSKALQRP | 71 | 920-936 | peptide | ten Bosch, 1996 |
| | | | | VAS | | | | |
| | | DR9 | 3 | ATGFKQSSKALQRP | 71 | 920-936 | peptide | Makita, 2002 |
| | | | | VAS | | | | |
| B-RAF | melanoma | A2 | | LATEKSRWS | 72 | | | Somasundaram, |
| | | | | | | | | 2006 |
| | | A2 | | LATEKSRWSG | 73 | | | Somasundaram, |
| | | | | | | | | 2006 |
| | | A33 | | FGLATEKSR | 74 | | | Andersen, 2004 |
| | | B27 | | GDFGLATEK | 75 | | | Andersen, 2004 |
| | | DR4 | 24 | EDLTVKIGDFGLATE | 76 | 586-614 | peptide | Sharkey, 2004 |
| | | | | KSRWSGSHQFEQLS | | | | |
| CASP-5 | colorectal, | A2 | 44 | FLIIWQNTM | 77 | 67-75 | peptide | Schwitalle, 2004 |
| | gastric, and | | | | | | | |
| | endometrial | | | | | | | |
| | carcinoma | | | | | | | |
| dek-can fusion | myeloid | DR53 | 49 | TMKQICKKEIRRLHQY | 78 | 342-357 | peptide | Makita, 2002 |
| protein | leukemia | | | | | | | |
| ETV6-AML1 | acute | A2 | 44 | RIAECILGMi | 79 | 334-342 | peptide | Yotnda, 1998b |
| fusion protein | lymphoblastic | DP5 | 3 | IGRIAECILGMNPSR | 80 | 332-346 | peptide | Yun, 1999 |
| | leukemia | DP17 | 1 | IGRIAECILGMNPSR | 80 | 332-346 | peptide | Yun, 1999 |
| FLT3-ITD | acute | A1 | 26 | YVDFREYEYY | 81 | 591-600 | peptide | Graf, 2007 |
| | myelogenous | | | | | | | |
| | leukemia | | | | | | | |
| FNDC3B | chronic | A2 | 44 | VVMSWAPPV | 82 | 292-300 | peptide | Rajasagi, 2004 |
| | lymphocytic | | | | | | | |
| | leukemia | | | | | | | |
| OGT | colorectal | A2 | 44 | SLYKFSPFPLg | 83 | 28-37 | peptide | Ripberger, 2003 |
| | carcinoma | | | | | | | |
| p53 | head and neck | A2 | 44 | VVPCEPPEV | 84 | 217-225 | peptide | Ito, 2007 |
| | squamous cell | | | | | | | |
| | carcinoma | | | | | | | |
| pml-RARalpha | promyelocytic | DR11 | 25 | NSNHVASGAGEAAI | 85 | | peptide | Gambacorti, 1993 |
| fusion protein | leukemia | | | ETQSSSSEEIV | | | | |
| PAX-FKHR | | B7 | | SPANSIRHNL | 86 | | | van den Broeke, |
| fusion | | | | | | | | 2006 |
| | | B7 | | SPQNSIRHNL | 87 | | | van den Broeke, |
| | | | | | | | | 2006 |
| PRDX5 | melanoma | A2 | 44 | LLLDDLLVSI | 88 | 163-172 | peptide | Sensi, 2005 |
| | | A2 | | AMAPIKVRL | 89 | | | Sensi, 2009 |
| K-ras | pancreatic | B35 | 20 | VVVGAVGVG | 47 | 15-Jul | peptide | Gjertsen, 1997 |
| | adenocarcinoma | | | | | | | |
| SYT-SSX1 or - | sarcoma | A24 | | GYDQIMPKK | 90 | | | Sato, 2002; Ida, |
| SSX2 fusion | | | | | | | | 2004 |
| protein | | A24 | | GYDQIMPKI | 91 | | | Ida, 2004 |
| | | B7 | 17 | QRPYGYDQIM | 92 | 402-410 (SYT) | peptide | Worley, 2001 |
| KIAAO205 | mutation | B44 | 21 | AEPINIQTW | 40 | | peptide | Gueguen, 1998 |
| ME1 | mutation | A2 | 44 | FLDEFMEGV | 44 | | peptide | Karanikas, 2001 |
| EGFRvIII | Mutation | A2 | 44 | LEEKKGNYV | 93 | | peptide | Wu, 2006 |
| TGF-betaRII | colorectal | A2 | 44 | RLSSCVPVAg | 94 | 131-139 | peptide | Linnebacher, 2001 |
| | carcinoma | A2 | 44 | RLSSCVPVAg | 94 | 111- | peptide | Lu, 2013 |
| | | | | | | 119(p16INK4a- | | |
| | | | | | | ORF3) | | |
| | | | | | | 111-112 (SSX2) | | |

TUMOR-SPECIFIC

| | | | | | | | |
|---|---|---|---|---|---|---|---|
| BAGE-1 | Cw16 | 7 | AARAVFLAL | 95 | 10-Feb | autologous | Boel, 1995 |
| | | | | | | tumor cells | |
| D393-CD20n | DR4 | 24 | KPLFRRMSSLELVIA | 96 | 28-42 | peptide | Vauchy, 2015 |
| Cyclin-A1 | A2 | 44 | FLDRFLSCM | 97 | 227-235 | peptide | Ochsenreither, |
| | | | | | | | 2012 |
| | A2 | 44 | SLIAAAAFCLA | 98 | 341-351 | peptide | Ochsenreither, |
| | | | | | | | 2012 |
| GAGE-1,2,8 | Cw6 | 18 | YRPRPRRY | 99 | 16-Sep | autologous | Van den Eynde, |
| | | | | | | tumor cells | 1995 |
| GAGE-3,4,5,6,7 | A29 | 6 | YYWPRPRRY | 100 | 18-Oct | autologous | De Backer, 1999 |
| | | | | | | tumor cells | |
| GnTVf | A2 | 44 | VLPDVFIRC(V) | 101 | intron | autologous | Guilloux, 1996 |
| | | | | | | tumor cells | |
| GPC3 | A2 | | FLAELAYDL | 102 | | | O'beirne, 2010 |
| HERV-E | A11 | | ATFLGSLTWK | 103 | | | Takahashi, 2008 |
| HERV-K-MEL | A2 | 44 | MLAVISCAV | 104 | 9-Jan | autologous | Schiavetti, 2002 |
| | | | | | | tumor cells | |
| KK-LC-1 | B15 | 13 | RQKRILVNL | 105 | 76-84 | autologous | Fukuyama, 2006 |
| | | | | | | tumor cells | |
| KM-HN-1 | A24 | 20 | NYNNFYRFL | 106 | 196-204 | peptide | Monji, 2004 |
| | A24 | 20 | EYSKECLKEF | 107 | 499-508 | peptide | Monji, 2004 |
| | A24 | 20 | EYLSLSDKI | 108 | 770-778 | peptide | Monji, 2004 |
| LAGE-1 | A2 | 44 | MLMAQEALAFL | 109 | ORF2 | autologous | Aarnoudse, 1999 |
| | | | | | (1-11) | tumor cells | |
| | A2 | 44 | SLLMWITQC | 110 | 157-165 | peptide | Rimoldi, 2000 |
| | A31 | 5 | LAAQERRVPR | 111 | ORF2 | autologous | Wang, 1998 |
| | | | | | (18-27) | tumor cells | |
| | A68 | 8 | ELVRRILSR | 112 | 103-111 | adenovirus- | Sun, 2006 |
| | | | | | | dendritic cells | |
| | B7 | 17 | APRGVRMAV | 113 | ORF2 | adenovirus-APC | Slager, 2004b |
| | | | | | (46-54) | | |
| | DP4 | 75 | SLLMWITQCFLPVF | 114 | 157-170 | peptide | Zeng, 2001 |
| | DR3 | 21 | QGAMLAAQERRVP | 115 | ORF2 | protein | Slager, 2004a |
| | | | RAAEVPR | | (14-33) | | |
| | DR4 | 24 | AADHRQLQLSISSCL | 116 | 139-156 | protein | Jager, 2000 |
| | | | QQL | | | | |
| | DR11 | 25 | CLSRRPWKRSWSAG | 117 | ORF2 | peptide | Slager, 2003 |
| | | | SCPGMPHL | | (81-102) | | |
| | DR12 | 5 | CLSRRPWKRSWSAG | 117 | ORF2 | peptide | Slager, 2003 |
| | | | SCPGMPHL | | (81-102) | | |
| | DR13 | 19 | ILSRDAAPLPRPG | 118 | 108-120 | autologous | Wang, 2004 |
| | | | | | | tumor cells | |
| | DR15 | 20 | AGATGGRGPRGAGA | 119 | 37-50 | protein | Hasegawa, 2006 |
| LY6K | A24 | 20 | RYCNLEGPPI | 120 | 119-128 | peptide | Suda, 2007 |
| | DP5 | 3 | KWTEPYCVIAAVKIF | 121 | 61-84 | peptide | Tomita, 2014 |
| | | | PRFFMVAKQ | | | | |
| | DR15 | 20 | KCCKIRYCNLEGPPI | 122 | 114-133 | peptide | Tomita, 2014 |
| | | | NSSVF | | | | |
| MAGE-A1 | A1 | 26 | EADPTGHSY | 123 | 161-169 | autologous | Traversari, 1992 |
| | | | | | | tumor cells | |
| | A*0201 | | YLEYRQVPV | 124 | | | |
| | | | YLEYRQVPD | 125 | | | |
| | A2 | 44 | KVLEYVIKV | 126 | 278-286 | peptide | Ottaviani, 2005 |
| | | | | | | | Pascolo, 2001 |
| | A3 | 22 | SLFRAVITK | 127 | 96-104 | poxvirus- | Chaux, 1999a |
| | | | | | | dendritic cellsc | |
| | A24 | | NYKHCFPEI | 128 | | | Fujie, 1999 |
| | A68 | 8 | EVYDGREHSA | 129 | 222-231 | poxvirus- | Chaux, 1999a |
| | | | | | | dendritic cells | |
| | B7 | 17 | RVRFFFPSL | 130 | 289-298 | poxvirus- | Luiten, 2000a |
| | | | | | | dendritic cells | |
| | B35 | 20 | EADPTGHSY | 123 | 161-169 | poxvirus- | Luiten, 2000b |
| | | | | | | dendritic cells | |
| | B37 | 3 | REPVTKAEML | 131 | 120-129 | autologous | Tanzarella, 1999 |
| | | | | | | tumor cells | |
| | B44 | 21 | KEADPTGHSY | 132 | 160-169 | poxvirus- | Stroobant, 2012 |
| | | | | | | dendritic cells | |
| | B53 | 2 | DPARYEFLW | 133 | 258-266 | poxvirus- | Chaux, 1999a |
| | | | | | | dendritic cells | |
| | B57 | 8 | ITKKVADLVGF | 134 | 102-112 | ALVAC-dendritic | Corbiere, 2004 |
| | | | | | | cells | |
| | Cw2 | 10 | SAFPTTINF | 135 | 62-70 | poxvirus- | Chaux, 1999a |
| | | | | | | dendritic cells | |
| | Cw3 | 17 | SAYGEPRKL | 136 | 230-238 | poxvirus- | Chaux, 1999a |
| | | | | | | dendritic cells | |
| | Cw7 | 41 | RVRFFFPSL | 130 | 289-298 | peptide | Goodyear, 2011 |
| | Cw16 | 7 | SAYGEPRKL | 136 | 230-238 | autologous | van der Bruggen, |
| | | | | | | tumor cells | 1994a |
| | DP4 | 75 | TSCILESLFRAVITK | 137 | 90-104 | peptide | Wang, 2007 |
| | DP4 | 75 | PRALAETSYVKVLEY | 138 | 268-282 | peptide | Wang, 2007 |
| | DR13 | 19 | FLLLKYRAREPVTKAE | 139 | 112-127 | protein | Chaux, 1999b |
| | DR15 | 20 | EYVIKVSARVRF | 140 | 281-292 | protein | Chaux, 2001 |
| MAGE-A2 | A2 | 44 | YLQLVFGIEV | 141 | 157-166 | peptide | Kawashima, 1998 |
| | A2 | | YLEYRQVPV | 124 | | | Graff-Dubois, 2002 |
| | A2 | | LVHFLLLKY | 142 | | | Bredenbeck. 2005 |
| | A2 | | KMVELVHFL | 143 | | | Visseren, 1997 |
| | A2 | | LVQENYLEY | 144 | | | Bredenbeck. 2005 |
| | A24 | 20 | EYLQLVFGI | 145 | 156-164 | peptide | Tahara, 1999 |
| | B37 | 3 | REPVTKAEML | 131 | 127-136 | autologous | Tanzarella, 1999 |
| | | | | | | tumor cells | |
| | Cw7 | 41 | EGDCAPEEK | 146 | 212-220 | lentivirus- | Breckpot, 2004 |
| | | | | | | dendritic cells | |
| | DR13 | 19 | LLKYRAREPVTKAE | 147 | 121-134 | protein | Chaux, 1999b |
| MAGE-A3 | A1 | 26 | EVDPIGHLY | 148 | 168-176 | autologous | Gaugler, 1994 |
| | | | | | | tumor cells | |
| | A2 | 44 | FLWGPRALVd | 149 | 271-279 | peptide | van der Bruggen, |
| | | | | | | | 1994b |
| | A2 | 44 | KVAELVHFL | 150 | 112-120 | peptide | Kawashima, 1998 |
| | A2 | | YLEYRQVPV | 124 | | | Graff-Dubois, 2002 |
| | A2 | | LVFGIELMEV | 151 | | | Keogh, 2001 |
| | A24 | | IMPKAGLLI | 152 | | | Tanaka, 2000 |
| | A24 | 20 | TFPDLESEF | 153 | 97-105 | peptide | Oiso, 1999 |
| | A24 | 20 | VAELVHFLL | 154 | 113-121 | peptide | Miyagawa, 2006 |
| | B18 | 6 | MEVDPIGHLY | 155 | 167-176 | adeno-dendritic | Bilsborough, 2002 |
| | | | | | | cells | |
| | | | YLEYRQVPG | 156 | | | |
| | B35 | 20 | EVDPIGHLY | 148 | 168-176 | poxvirus- | Schultz, 2001 |
| | | | | | | dendritic cells | |
| | B37 | 3 | REPVTKAEML | 131 | 127-136 | autologous | Tanzarella, 1999 |
| | | | | | | tumor cells | |
| | B40 | 6 | AELVHFLLLi | 157 | 114-122 | adeno-dendritic | Schultz, 2002 |
| | | | | | | cells | |
| | B44 | 21 | MEVDPIGHLY | 155 | 167-176 | peptide | Herman, 1996 |
| | B52 | 5 | WQYFFPVIF | 158 | 143-151 | retrovirus- | Russo, 2000 |
| | | | | | | dendritic cellsh | |
| MAGE-A3 | Cw7 | 41 | EGDCAPEEK | 146 | 212-220 | lentivirus- | Breckpot, 2004 |
| | | | | | | dendritic cells | |
| | DP4 | 75 | KKLLTQHFVQENYLEY | 159 | 243-258 | protein | Schultz, 2000 |
| | DP4 | 75 | RKVAELVHFLLLKYR | 160 | 111-125 | peptide | Cesson, 2011 |
| | DQ6 | 63 | KKLLTQHFVQENYLEY | 159 | 243-258 | peptide | Schultz, 2004 |
| | DR1 | 18 | ACYEFLWGPRALVE | 161 | 267-282 | protein | Zhang, 2003 |
| | | | TS | | | | |
| | DR4 | 24 | RKVAELVHFLLLKYR | 160 | 111-125 | peptide | Cesson, 2010 |
| | DR4 | 24 | VIFSKASSSLQL | 162 | 149-160 | peptide | Kobayashi, 2001 |
| | DR7 | 25 | VIFSKASSSLQL | 162 | 149-160 | peptide | Kobayashi, 2001 |
| | DR7 | 25 | VFGIELMEVDPIGHL | 163 | 161-175 | peptide | Cesson, 2011 |
| | DR11 | 25 | GDNQIMPKAGLLIIV | 164 | 191-205 | peptide | Consogno, 2003 |
| | DR11 | 25 | TSYVKVLHHMVKISG | 165 | 281-295 | protein | Manici, 1999 |
| | DR13 | 19 | RKVAELVHFLLLKYRA | 166 | 111-126 | protein | Chaux, 1999b |
| | DR13 | 19 | FLLLKYRAREPVTKAE | 139 | 119-134 | protein | Chaux, 1999b |
| MAGE-A4 | A1 | 26 | EVDPASNTYJ | 167 | 169-177 | peptide after | Kobayashi, 2003 |
| | | | | | | tetramer sorting | |
| | A2 | | YLEYRQVPV | 124 | | | Graff-Dubois, 2002 |
| | A2 | 44 | GVYDGREHTV | 168 | 230-239 | adeno-dendritic | Duffour, 1999 |
| | | | | | | cells | |
| | A24 | 20 | NYKRCFPVI | 169 | 143-151 | peptide | Miyahara, 2005 |
| | | | | | | | Ottaviani, 2006 |
| | B37 | 3 | SESLKMIF | 170 | 156-163 | poxvirus- | Zhang, 2002 |
| | | | | | | dendritic cells | |
| MAGE-A5 | | | | | | | |
| MAGE-A6 | A34 | 1 | MVKISGGPR | 171 | 290-298 | autologous | Zorn, 1999 |
| | | | | | | tumor cells | |
| | B35 | 20 | EVDPIGHVY | 172 | 168-176 | autologous | Benlalam, 2003 |
| | | | | | | tumor cells | |
| | B37 | 3 | REPVTKAEML | 131 | 127-136 | autologous | Tanzarella, 1999 |
| | | | | | | tumor cells | |
| | Cw7 | 41 | EGDCAPEEK | 146 | 212-220 | lentivirus- | Breckpot, 2004 |
| | | | | | | dendritic cells | |
| | Cw16 | 7 | ISGGPRISY | 173 | 293-301 | autologous | Vantomme, 2003 |
| | | | | | | tumor cells | |
| | | | YLEYRQVPG | 156 | | | |
| | DR13 | 19 | LLKYRAREPVTKAE | 147 | 121-134 | protein | Chaux, 1999b |
| MAGE-A7 | | | | | | | |
| MAGE-A8 | A2 | | KVAELVRFL | 174 | | | Bar-Haim, 2004 |
| | A2 | | GLMDVQIPT | 175 | | | Bar-Haim, 2004 |
| MAGE-A9 | A2 | 44 | ALSVMGVYV | 176 | 223-231 | peptide | Oehlrich, 2005 |
| MAGE-A10 | A2 | 44 | GLYDGMEHLI | 177 | 254-262 | autologous | Huang, 1999 |
| | | | | | | tumor cells | |
| | A2 | | YLEYRQVPG | 156 | | | Graff-Dubois, 2002 |
| | A2 | | SLLKFLAKV | 178 | | | Jia, ZC, 2011 |
| | B53 | 2 | DPARYEFLW | 133 | 290-298 | poxvirus- | Chaux, 1999a |
| | | | | | | de]ndritic cells | |
| MAGE-A11 | | | | | | | |
| MAGE-A12m | A2g | 44 | FLWGPRALVe | 179 | 271-279 | peptide | van der Bruggen, |
| | | | | | | | 1994b |
| | A2 | | YLEYRQVPV | 124 | | | Graff-Dubois, 2002 |
| | Cw7 | 41 | VRIGHLYIL | 180 | 170-178 | autologous | Heidecker, 2000 |
| | | | | | | tumor cells | Panelli, 2000 |
| | Cw7 | 41 | EGDCAPEEK | 146 | 212-220 | lentivirus- | Breckpot, 2004 |
| | | | | | | dendritic cells | |
| | DP4 | 75 | REPFTKAEMLGSVIR | 181 | 127-141 | peptide | Wang, 2007 |
| | | | YLEYRQVPG | 156 | | | |
| | DR13 | 19 | AELVHFLLLKYRAR | 182 | 114-127 | protein | Chaux, 1999b |
| MAGE-C1 | A2 | 44 | ILFGISLREV | 183 | 959-968 | peptide | Anderson, 2011 |
| | A2 | 44 | KVVEFLAML | 184 | 1083-1091 | peptide | Anderson, 2011 |
| | DQ6 | 63 | SSALLSIFQSSPE | 185 | 137-149 | peptide | Nuber, 2010 |
| | DQ6 | 63 | SFSYTLLSL | 186 | 450-458 | peptide | Nuber, 2010 |
| | DR15 | 20 | VSSFFSYTL | 187 | 779-787 | peptide | Nuber, 2010 |
| MAGE-C2 | A2 | 44 | LLFGLALIEV | 188 | 191-200 | autologous | Ma, 2004 |
| | | | | | | tumor cells | |
| | A2 | 44 | ALKDVEERV | 189 | 336-344 | autologous | Ma, 2004 |
| | | | | | | tumor cells | |
| | | | TLDEKVAELV | 190 | | | Xing, 2008 |
| | | | KVLEFLAKL | 191 | | | Xing, 2008 |
| | | | FLAKLNNTV | 192 | | | Li, 2005 |
| | | | VIWEVLNAV | 193 | | | Xing, 2008 |
| | B44 | 21 | SESIKKKVL | 194 | 307-315 | autologous | Godelaine, 2007 |
| | | | | | | tumor cells | |
| | B57 | 8 | ASSTLYLVF | 195 | 42-50 | autologous | Ma, 2011 |
| | | | | | | tumor cells | |
| | DR15 | 20 | SSTLYLVFSPSSFST | 196 | 43-57 | peptide | Wen, 2011 |
| MAGE-n | A2 | | FLWGPRALA | 197 | | | Dong, 2004 |
| | A2 | | QLVFGIEVV | 198 | | | Dong, 2004 |
| mucink | | | PDTRPAPGSTAPPA | 199 | | transfected B | Jerome, 1993 |
| | | | HGVTSA | | | cells | |
| NA88-A | B13 | 6 | QGQHFLQKV | 200 | | tumor- | Moreau-Aubry, |
| | | | | | | infiltrating | 2000 |
| | | | | | | lymphocytes | |
| NY-ESO-1/ | A2 | 44 | SLLMWITQC | 110 | 157-165 | autologous | Jager, 1998 |
| LAGE-2 | | | | | | tumor cells | Chen, 2000 |
| | | | | | | | Valmori, 2000 |
| | A2 | 44 | MLMAQEALAFL | 109 | ORF2 | autologous | Aarnoudse, 1999 |
| | | | | | (1-11) | tumor cells | |
| | A2 | | SLLMWITQCFL | 201 | | | Jager, 1998 |
| | A2 | | QLSLLMWIT | 202 | | | Jager, 1998 |
| | A24 | | LLMWITQCF | 203 | | | Yamaguchi, 2004 |
| | A24 | 20 | YLAMPFATPME | 204 | 91-101 | peptide | Eikawa, 2013 |
| NY-ESO-1/ | A31 | 5 | ASGPGGGAPR | 205 | 53-62 | autologous | Wang, 1998 |
| LAGE-2 | | | | | | tumor cells | |
| | A31 | 5 | LAAQERRVPR | 111 | ORF2 | autologous | Wang, 1998 |
| | | | | | (18-27) | tumor cells | |
| | A68 | 8 | TVSGNILTIR | 206 | 127-136 | mRNA- | Matsuzaki, 2008 |
| | | | | | | transfected cells | |
| | B7 | 17 | APRGPHGGAASGL | 207 | 60-72 | peptide | Ebert, 2009 |
| | B35 | 20 | MPFATPMEAEL | 208 | 94-104 | peptide | Eikawa, 2013 |
| | B49 | | KEFTVSGNILTI | 209 | 124-135 | mRNA- | Knights, 2009 |
| | | | | | | transfected cells | |
| | B51 | 12 | MPFATPMEA | 210 | 94-102 | adenovirus-APC | Jager, 2002 |
| | B52 | 5 | FATPMEAEL | 211 | 96-104 | peptide | Eikawa, 2013 |
| | C12 | 12 | FATPMEAELAR | 212 | 96-106 | peptide | Eikawa, 2013 |
| | Cw3 | 17 | LAMPFATPM | 213 | 92-100 | adenovirus- | Gnjatic, 2000 |
| | | | | | | PBMC | |
| | Cw6 | 18 | ARGPESRLL | 214 | 80-88 | adenovirus- | Gnjatic, 2000 |
| | | | | | | PBMCd | |
| | DP4 | 75 | SLLMWITQCFLPVF | 114 | 157-170 | peptide | Zeng, 2001 |
| | DP4 | 75 | LLEFYLAMPFATPM | 215 | 87-111 | peptide | Mandic, 2005 |
| | | | EAELARRSLAQ | | | | |
| | DR1 | 18 | LLEFYLAMPFATPM | 215 | 87-111 | peptide | Mandic, 2005 |
| | | | EAELARRSLAQ | | | | |
| | DR1 | 18 | EFYLAMPFATPM | 216 | 89-100 | protein | Chen, 2004 |
| | DR1 | 18 | PGVLLKEFTVSGNILT | 217 | 119-143 | peptide | Ayyoub, 2010 |
| | | | IRLTAADHR | | | | |
| | DR2 | 25 | RLLEFYLAMPFA | 218 | 86-97 | protein | Chen, 2004 |
| | DR3 | 21 | QGAMLAAQERRVP | 115 | ORF2 | protein | Slager, 2004a |
| | | | RAAEVPR | | (14-33) | | |
| | DR4 | 24 | PFATPMEAELARR | 219 | 95-107 | peptide | Mizote, 2010 |
| | DR4 | 24 | PGVLLKEFTVSGNILT | 220 | 119-138 | peptide and | Jager, 2000 |
| | | | IRLT | | | protein | Zarour, 2000 |
| | DR4 | 24 | VLLKEFTVSG | 221 | 121-130 | peptide | Zeng, 2000 |
| NY-ESO-1/ | DR4 | 24 | AADHRQLQLSISSCL | 116 | 139-156 | protein | Jager, 2000 |
| LAGE-2 | | | QQL | | | | |
| | DR4 | 24 | LLEFYLAMPFATPM | 215 | 87-111 | peptide | Mandic, 2005 |
| | | | EAELARRSLAQ | | | | |
| | DR52b | 25 | LKEFTVSGNILTIRL | 222 | 123-137 | protein | Bioley, 2009 |
| | DR7 | 25 | PGVLLKEFTVSGNILT | 217 | 119-143 | peptide | Zarour, 2002 |
| | | | IRLTAADHR | | | | |
| | DR7 | 25 | LLEFYLAMPFATPM | 215 | 87-111 | peptide | Mandic, 2005 |
| | | | EAELARRSLAQ | | | | |
| | DR8 | 4 | KEFTVSGNILT | 223 | 124-134 | peptide | Mizote, 2010 |
| | DR9 | 3 | LLEFYLAMPFATPM | 224 | 87-100 | peptide | Mizote, 2010 |
| | DR15 | 20 | AGATGGRGPRGAGA | 119 | 37-50 | protein | Hasegawa, 2006 |
| Neutrophil | | | VLQELNVTV | 225 | | | |
| granule | | | | | | | |
| proteases | | | | | | | |
| OFA-iLR | A2 | | ALCNTDSPL | 226 | | | Siegel, S. 2006 |
| | A2 | | LLAARAIVAI | 227 | | | Siegel, S. 2006 |
| PTH-rP | A2 | | TSTTSLELD | 228 | | | Francini, 2002 |
| | A2 | | FLHHLIAEIH | 229 | | | Francini, 2002 |
| S2 | A26 | | DLWKETVFT | 230 | | | Koga, 2003 |
| SAGE | A24 | 20 | LYATVIH DI | 231 | 715-723 | peptide | Miyahara, 2005 |
| Sp17 | A1 | 26 | ILDSSEEDK | 232 | 103-111 | protein | Chiriya-Internati, |
| | | | | | | | 2003 |
| SSX-2 | A2 | 44 | KASEKIFYV | 233 | 41-49 | autologous | Ayyoub, 2002 |
| | | | | | | tumor cells | |
| | A2 | | RLQGISPKI | 234 | | | Wagner, 2003 |
| | DP1 | 14 | EKIQKAFDDIAKYFSK | 235 | 19-34 | peptide | Ayyoub, 2004a |
| | DR1 | 18 | FGRLQGISPKI | 236 | 101-111 | peptide | Neumann, 2011 |
| | DR3 | 21 | WEKMKASEKIFYVY | 237 | 37-54 | peptide | Ayyoub, 2005a |
| | | | MKRK | | | | |
| | DR4 | 24 | KIFYVYMKRKYEAMT | 238 | 45-59 | peptide] | Neumann, 2004 |
| | DR11 | 25 | KIFYVYMKRKYEAM | 239 | 45-58 | protein | Ayyoub, 2004b |
| SSX-4 | DP10 | 2 | INKTSGPKRGKHAW | 240 | 151-170 | peptide | Ayyoub, 2005b |
| | | | THRLRE | | | | |
| SSX-4 | DR3 | 21 | YFSKKEWEKMKSSE | 241 | 31-50 | peptide | Ayyoub, 2005b |
| | | | KIVYVY | | | | |
| | DR8 | 4 | MKLNYEVMTKLGFK | 242 | 51-70 | peptide | Valmori, 2006 |
| | | | VTLPPF | | | | |
| | DR8 | 4 | KHAWTHRLRERKQL | 243 | 161-180 | peptide | Valmori, 2006 |
| | | | VVYEEI | | | | |
| | DR11 | 25 | LGFKVTLPPFMRSKR | 244 | 61-80 | peptide | Ayyoub, 2005b |
| | | | AADFH | | | | |
| | DR15 | 20 | KSSEKIVYVYMKLNY | 245 | 41-60 | peptide | Ayyoub, 2005b |
| | | | EVMTK | | | | |
| | DR52 | 41 | KHAWTHRLRERKQL | 243 | 161-180 | peptide | Valmori, 2006 |
| | | | VVYEEI | | | | |
| TAG | A3 | | RLSNRLLLR | 246 | | | Hogen, 2004 |
| TAG-1 | A2 | 44 | SLGWLFLLL | 247 | 78-86 | peptide | Adair, 2008 |
| | B8 | 14 | LSRLSNRLL | 248 | 42-50 | peptide | Adair, 2008 |
| TAG-2 | B8 | 14 | LSRLSNRLL | 248 | 42-50 | peptide | Adair, 2008 |
| TPBG | A1, A2, | | LTYVSFRNL | 249 | | | Shingler, 2009 |
| | A3, B7 | | | | | | |
| | A2 | | DLPAYVRNL | 250 | | | Smyth, 2006 |
| | A2 | | FLTGNQLAV | 251 | | | Shingler, 2009 |
| | A2 | | GAFEHLPSL | 252 | | | Smyth, 2006 |
| | A2 | | RLARLALVL | 253 | | | Shingler, 2009 |
| | Cw7 | | PLADLSPFA | 254 | | | Redchenko, 2006 |
| TRAG-3 | A2 | | ILLRDAGLV | 255 | | | Zhu, 2003 |
| | DR1 | 18 | CEFHACWPAFTVLGE | 256 | 34-48 | peptide | Janjic, 2006 |
| | DR4 | 24 | CEFHACWPAFTVLGE | 256 | 34-48 | peptide | Janjic, 2006 |
| | DR7 | 25 | CEFHACWPAFTVLGE | 256 | 34-48 | peptide | Janjic, 2006 |
| TRP2-6b | A2 | | ATTNILEHY | 257 | | | Khong, 2002 |
| TRP2-INT2g | A68 | 8 | EVISCKLIKR | 258 | intron 2 | autologous | Lupetti, 1998 |
| | | | | | | tumor cells | |
| TTK | A24 | | SYRNEIAYL | 259 | | | Suda T, 2007 |
| XAGE- | A2 | 44 | RQKKIRIQL | 260 | 21-29 | peptide | Ohue, 2012 |
| 1b/GAGED2a | DR4 | 24 | HLGSRQKKIRIQLRSQ | 261 | 17-32 | peptide | Ohue, 2012 |
| | DR9 | 3 | CATWKVICKSCISQT | 262 | 33-49 | autologous | Shimono, 2007 |
| | | | PG | | | tumor cells | |
| ART-4 | A24 | | AFLRHAAL | 263 | | | Kawano, 2000 |
| | A24 | | DYPSLSATDI | 264 | | | Kawano, 2000 |
| CDCA1/NUF2 | A2 | | YMMPVNSEV | 265 | | | Harao, 2008 |
| | A2 | | KLATAQFKI | 266 | | | Harao, 2008 |
| Cep55/c10orf3 | A24 | | VYVKGLLAKI | 267 | | | Inoda, 2009 |
| CML28 | A2 | | ALVDAGVPM | 268 | | | Han, 2006 |
| (EXOSC5) | | | | | | | |
| DAM-6, -10 | A2 | | FLWGPRAYA | 269 | | | Fleischhauer, 1998 |
| (MAGE-B1) | | | | | | | |
| IMP-3 | A2 | | RLLVPTQFV | 270 | | | Tomita, Y, 2010 |
| | A2 | | NLSSAEVVV | 271 | | | Tomita, Y, 2010 |
| | A24 | | KTVNELQNL | 272 | | | Suda T, 2007 |
| OVA66 | A2 | | FLPDHINIV | 273 | | | Jin, 2008 |
| OY-TES-1 | A24 | | KTPFVSPLL | 274 | | | Okumura,, 2005 |
| PASD1 | A2 | | QLLDGFMITL | 275 | | | Ait-Tahar, 2009 |
| | A2 | | YLVGNVCIL | 276 | | | Ait-Tahar, 2009 |
| | A2 | | ELSDSLGPV | 277 | | | Ait-Tahar, 2009 |
| RHAMM/CD168 | A2 | | ILSLELMKL | 278 | | | Greiner, 2005 |
| | A2 | | SLEENIVIL | 279 | | | Greiner, 2005 |
| SART-1 | A2 | | KGSGKMKTE | 280 | | | Shichijo, 1998 |
| | A24 | | EYRGFTQDF | 281 | | | Kikuchi, 1999 |
| SART-3 | A2 | | RLAEYQAYI | 282 | | | Ito, 2000 |
| | A2 | | LLQAEAPRL | 283 | | | Ito, 2000 |
| | A3 | | WLEYYNLER | 284 | | | Minami, 2007 |
| | A3 | | QIRPIFSNR | 285 | | | Minami, 2007 |
| | A24 | | VYDYNCHVDL | 286 | | | Yang, 1999 |
| | A24 | | AYIDFEMKI | 287 | | | Yang, 1999 |
| | A26 | | VYDYNCHVDL | 286 | | | Niu, 2009 |

DIFFERENTIATION

| | | | | | | | | |
|---|---|---|---|---|---|---|---|---|
| CEA | gut carcinoma | A2 | 44 | YLSGANLNLg | 288 | 605-613 | peptide | Tsang, 1995 |
| | | A2 | 44 | IMIGVLVGV | 289 | 691-699 | peptide | Kawashima, 1998a |
| | | A2 | 44 | GVLVGVALI | 290 | 694-702 | peptide | Alves, 2007 |
| | | A2 | | VLYGPDAPTV | 291 | | | Keogh, 2001 |
| | | A2 | | YLSGANLNV | 292 | | | Keogh, 2001 |
| | | A2 | | ATVGIMIGV | 293 | | | Keogh, 2001 |
| | | A3 | 22 | HLFGYSWYK | 294 | 61-69 | peptide | Kawashima, 1999 |
| | | A24 | 20 | QYSWFVNGTF | 295 | 268-277 | peptide | Nukaya, 1999 |
| | | A24 | 20 | TYACFVSNL | 296 | 652-660 | peptide | Nukaya, 1999 |
| | | B27 | | HRWCIPWQRL | 297 | | | Huarte, 2002 |
| | | DR3 | 21 | AYVCGIQNSVSANRS | 298 | 568-582 | peptide | Crosti, 2006 |
| | | DR4 | 24 | DTGFYTLHVIKSDLV | 299 | 116-140 | peptide | Shen, 2004 |
| | | | | NEEATGQFRV | | | | |
| | | DR4 | 24 | YSWRINGIPQQHTQV | 300 | 625-639 | peptide | Ruiz, 2004 |
| | | DR7 | 25 | TYYRPGVNLSLSC | 301 | 425-437 | peptide | Crosti, 2006 |
| | | DR7 | 25 | EIIYPNASLLIQN | 302 | 99-111 | peptide | Crosti, 2006 |
| | | DR9 | 3 | YACFVSNLATGRNNS | 303 | 653-667 | peptide | Kobayashi, 2002 |
| | | DR11 | 25 | LWWVNNQSLPVSP | 304 | 177-189 | peptide | Campi, 2003 |
| | | | | | | and | | |
| | | | | | | 355-367 | | |
| | | DR13 | 19 | LWWVNNQSLPVSP | 304 | 177-189 | peptide | Campi, 2003 |
| | | | | | | and | | |
| | | | | | | 355-367 | | |
| | | DR14 | 6 | LWWVNNQSLPVSP | 304 | 177-189 | peptide | Campi, 2003 |
| | | | | | | and | | |
| | | | | | | 355-367 | | |
| | | DR14 | 6 | EIIYPNASLLIQN | 302 | 99-111 | peptide | Crosti, 2006 |
| | | DR14 | 6 | NSIVKSITVSASG | 305 | 666-678 | peptide | Crosti, 2006 |
| gp100/ | melanoma | A2 | 44 | KTWGQYWQV | 306 | 154-162 | autologous | Bakker, 1995 |
| Pmel17 | | | | | | | tumor cells | Kawakami, 1995 |
| | | A2 | 44 | (A)MLGTHTMEV | 307 | 177(8)-186 | peptide | Tsai, 1997 |
| | | A2 | | IMDQVPFSV | 308 | | | Kawakami, 1995 |
| | | A2 | 44 | ITDQVPFSV | 309 | 209-217 | autologous | Kawakami, 1995 |
| | | | | | | | tumor cells | |
| | | A2 | 44 | YLEPGPVTA | 310 | 280-288 | autologous | Cox, 1994 |
| | | | | | | | tumor cells | |
| | | A2 | 44 | LLDGTATLRL | 311 | 457-466 | autologous | Kawakami, 1994a |
| | | | | | | | tumor cells | |
| | | A2 | 44 | VLYRYGSFSV | 312 | 476-485 | autologous | Kawakami, 1995 |
| | | | | | | | tumor cells | |
| | | A2 | 44 | SLADTNSLAV | 313 | 570-579 | peptide | Tsai, 1997 |
| gp100/ | melanoma | A2 | 44 | RLMKQDFSV | 314 | 619-627 | autologous | Kawakami, 1998 |
| Pmel17 | | | | | | | tumor cells | |
| | | A2 | 44 | RLPRIFCSC | 315 | 639-647 | autologous | Kawakami, 1998 |
| | | | | | | | tumor cells | |
| | | A3 | 22 | LIYRRRLMK | 316 | 614-622 | autologous | Kawakami, 1998 |
| | | | | | | | tumor cells | |
| | | A3 | 22 | ALLAVGATK | 317 | 17-25 | autologous | Skipper, 1996a |
| | | | | | | | tumor cells | |
| | | A3 | 22 | IALNFPGSQK | 318 | 86-95 | peptide | Kawashima, 1998b |
| | | A3 | 22 | RSYVPLAHR | 319 | 195-202 and | autologous | Michaux, 2014 |
| | | | | | | 191 or 192e | tumor cells | |
| | | A3 | 22 | ALNFPGSQK | 320 | 87-95 | peptide | Kawashima, 1998b |
| | | A11 | 13 | ALNFPGSQK | 320 | 87-95 | peptide | Kawashima, 1998b |
| | | A24 | 20 | VYFFLPDHL | 321 | intron 4 | autologous | Robbins, 1997 |
| | | | | | | | tumor cells | |
| | | A32 | 8 | RTKQLYPEW | 322 | 40-42 | autologous | Vigneron, 2004 |
| | | | | | | and | tumor cells | |
| | | | | | | 47-52e | | |
| | | A68 | 8 | HTMEVTVYHR | 323 | 182-191 | autologous | Sensi, 2002 |
| | | | | | | | tumor cells | |
| | | B7 | 17 | SSPGCQPPA | 324 | 529-537 | autologous | ennerz, 2005 |
| | | | | | | | tumor cells | |
| | | B35 | 20 | VPLDCVLYRY | 325 | 471-480 | autologous | Benlalam, 2003 |
| | | | | | | | tumor cells | |
| | | B35 | 20 | LPHSSSHWL | 326 | 630-638 | autologous | Vigneron, 2005 |
| | | | | | | | tumor cells | |
| | | Cw8 | -c | SNDGPTLI | 327 | 71-78 | autologous | Castelli, 1999 |
| | | | | | | | tumor cells | |
| | | DQ6 | 63 | GRAMLGTHTMEVT | 328 | 175-189 | peptide | Kobayashi, 2001 |
| | | | | VY | | | | |
| | | DR4 | 24 | WNRQLYPEWTEAQ | 329 | 44-59 | peptide | Touloukian, 2000 |
| | | | | RLD | | | | |
| | | DR7 | 25 | TTEWVETTARELPIP | 330 | 420-437 | protein | Parkhurst, 2004 |
| | | | | EPE | | | | |
| | | DR7 | 25 | TGRAMLGTHTMEV | 331 | 174-190 | retrovirus- | Lapointe, 2001 |
| | | | | TVYH | | | dendritic cells | |
| | | DR53 | 49 | GRAMLGTHTMEVT | 328 | 175-189 | peptide | Kobayashi, 2001 |
| | | | | VY | | | | |
| mammaglobin-A | breast cancer | A2 | | FLNQTDETL | 332 | | | Jaramillo, 2004 |
| | | A2 | | MQLIYDSSL | 333 | | | Jaramillo, 2004 |
| | | A2 | | KLLMVLMLA | 334 | | | Jaramillo, 2004 |
| | | A2 | | LIYDSSLCDL | 335 | | | Jaramillo, 2004 |
| | | A3 | | AIDELKECF | 336 | | | Jaramillo, 2002 |
| | | A3 | | TTNAIDELK | 337 | | | Jaramillo, 2002 |
| | | A3 | 22 | PLLENVISK | 338 | 23-31 | peptide | Jaramillo, 2002 |
| | | A3 | | KLLMVLMLA | 334 | | | Jaramillo, 2002 |
| Melan-A/ | melanoma | A2 | 44 | (E)AAGIGILTV | 339 | 26(27)-35 | autologous | Kawakami, 1994b |
| MART-1 | | | | | | | tumor cells | |
| | | A2 | 44 | ILTVILGVL | 340 | 32-40 | autologous | Castelli, 1995 |
| | | | | | | | tumor cells | |
| | | B35 | 20 | EAAGIGILTV | 341 | 26-35 | autologous | Benlalam, 2003 |
| | | | | | | | tumor cells | |
| | | B45 | 2 | AEEAAGIGIL(T) | 342 | 24-33(34) | autologous | Schneider, 1998 |
| | | | | | | | tumor cells | |
| | | Cw7 | 41 | RNGYRALMDKS | 343 | 51-61 | peptide | Larrieu, 2008 |
| | | DP5 | 3 | YTTAEEAAGIGILTVI | 344 | 21-50 | peptide | Meng, 2011 |
| | | | | LGVLLLIGCWYCRR | | | | |
| | | DQ6 | 63 | EEAAGIGILTVI | 345 | 25-36 | peptide | Bioley, 2006 |
| | | DR1 | 18 | AAGIGILTVILGVL | 346 | 27-40 | peptide | Bioley, 2006 |
| | | DR1 | 18 | APPAYEKLpSAEQf | 347 | 100-111 | peptide | Depontieu, 2009 |
| | | DR3 | 21 | EEAAGIGILTVI | 345 | 25-36 | peptide | Bioley, 2006 |
| | | DR4 | 24 | RNGYRALMDKSLHV | 348 | 51-73 | peptide | Zarour, 2000 |
| | | | | GTQCALTRR | | | | |
| | | DR11 | 25 | MPREDAHFIYGYPK | 349 | 20-Jan | peptide | Godefroy, 2006 |
| | | | | KGHGHS | | | | |
| | | DR52 | 41 | KNCEPVVPNAPPAY | 350 | 91-110 | peptide | Godefroy, 2006 |
| | | | | EKLSAE | | | | |
| MC1R | | A2 | | TILLGIFFL | 351 | | | Salazar-Onfray, |
| | | | | | | | | 1997 |
| | | A3 | | FLALIICNA | 352 | | | Salazar-Onfray, |
| | | | | | | | | 1997 |
| Mesothelin | | A2 | | KLLGPHVEGL | 353 | | | Yokokawa, 2005 |
| | | A2 | | KLLGPHVLGV | 354 | | | Yokokawa, 2005 |
| NGEP | | A2 | | GLFDEYLEMV | 355 | | | Cereda, 2010 |
| NY-BR-1 | breast cancer | A2 | 44 | SLSKILDTV | 356 | 904-912 | peptide | Wang, 2006 |
| | | A2 | | LLSHGAVIEV | 357 | | | Jager, 2005 |
| OA1 | melanoma | A24 | 20 | LYSACFWWL | 358 | 126-134 | peptide | Touloukian, 2003 |
| PAP | prostate | A2 | 44 | FLFLLFFWL | 9 | 18-26 | peptide | Olson, 2010 |
| | cancer | A2 | 44 | TLMSAMTNL | 10 | 112-120 | peptide | Olson, 2010 |
| | | A2 | 44 | ALDVYNGLL | 8 | 299-307 | peptide | Olson, 2010 |
| P Polypeptide | | A2 | | IMLCLIAAV | 359 | | | Touloukian, 2001 |
| PSA | prostate | A2 | 44 | FLTPKKLQCV | 360 | 165-174 | peptide | Correale, 1997 |
| | carcinoma | A2 | 44 | VISNDVCAQV | 361 | 178-187 | peptide | Correale, 1997 |
| RAB38/NY- | melanoma | A2 | 44 | VLHWDPETV | 362 | 50-58 | peptide | Walton, 2006 |
| MEL-1 | | | | | | | | |
| TARP | | A2 | | FLRNFSLMV | 363 | | | Oh, 2004 |
| | | A2 | | FVFLRNFSL | 364 | | | Oh, 2004 |
| | | A2 | | FLRNFSLML | 365 | | | Oh, 2004 |
| TRP-1/gp75 | melanoma | A31 | 5 | MSLQRQFLR | 366 | alt. ORF | autologous | Wang, 1996a |
| | | | | | | | tumor cells | |
| | | DR4 | 24 | ISPNSVFSQWRVVC | 367 | 277-297 | peptide | Touloukian, 2002 |
| | | | | DSLEDYD | | | | |
| | | DR15 | 20 | SLPYWNFATG | 368 | 245-254 | autologous | Robbins, 2002 |
| | | | | | | | tumor cells | |
| | | DR17 | 21 | SQWRVVCDSLEDYDT | 369 | 284-298 | peptide | Osen, 2010 |
| TRP-2 | melanoma | A1, A2 | | VYDFFVWLHY | 370 | | | Paschen, 2005 |
| | | A2 | | SLDDYNHLV | 371 | | | Sun, 2000 |
| | | A2 | | FVWLHYYSV | 372 | | | Bredenbeck. 2005 |
| | | A2 | 44 | SVYDFFVWL | 373 | 180-188 | peptide | Parkhurst, 1998 |
| | | A2 | 44 | TLDSQVMSL | 374 | 360-368 | peptide | Noppen, 2000 |
| | | A31 | 5 | LLGPGRPYR | 375 | 197-205 | autologous | Wang, 1996b |
| | | | | | | | tumor cells | Wang, 1998 |
| | | A33 | 5 | LLGPGRPYR | 375 | 197-205 | autologous | Wang, 1998 |
| | | | | | | | tumor cells | |
| | | Cw8 | -c | ANDPIFVVL | 376 | 387-395 | autologous | Castelli, 1999 |
| | | | | | | | tumor cells | |
| | | DR3 | 21 | QCTEVRADTRPWSGP | 377 | 60-74 | peptide | Paschen, 2005 |
| | | DR15 | 20 | ALPYWNFATG | 378 | 241-250 | autologous | Robbins, 2002 |
| | | | | | | | tumor cells | |
| tyrosinase | melanoma | A1 | 26 | KCDICTDEY | 379 | 243-251 | autologous | Kittlesen, 1998 |
| | | | | | | | tumor cells | |
| | | A1 | | DSDPDSFQDY | 380 | | | Schreibenbogen, |
| | | | | | | | | 2002 |
| | | A1 | 26 | SSDYVIPIGTY | 381 | 146-156 | autologous | Kawakami, 1998 |
| | | | | | | | tumor cells | |
| tyrosinase | melanoma | A2 | 44 | MLLAVLYCL | 382 | 1-9 | autologous | Wolfel, 1994 |
| | | | | | | | tumor cells | |
| | | A2 | 44 | CLLWSFQTSA | 383 | 8-17 | peptide | Riley, 2001 |
| | | A2 | 44 | YMDGTMSQV | 384 | 369-377 | autologous | Wolfel, 1994 |
| | | | | | | | tumor cells | Skipper, 1996b |
| | | A24 | 20 | AFLPWHRLF | 385 | 206-214 | autologous | Kang, 1995 |
| | | | | | | | tumor cells | |
| | | A24 | 20 | IYMDGTADFSF | 386 | 368-373 and | autologous | Dalet, 2011 |
| | | | | | | 336-340e | tumor cells | |
| | | A26 | 8 | QCSGNFMGF | 387 | 90-98 | autologous | Lennerz, 2005 |
| | | | | | | | tumor cells | |
| | | B35 | 20 | TPRLPSSADVEF | 388 | 309-320 | autologous | Benlalam, 2003 |
| | | | | | | | tumor cells | |
| | | B35 | 20 | LPSSADVEF | 389 | 312-320 | autologous | Morel, 1999 |
| | | | | | | | tumor cells | |
| | | B38 | 5 | LHHAFVDSIF | 390 | 388-397 | autologous | Lennerz, 2005 |
| | | | | | | | tumor cells | |
| | | B44 | 21 | SEIWRDIDFd | 391 | 192-200 | autologous | Brichard, 1996 |
| | | | | | | | tumor cells | |
| | | DR4 | 24 | QNILLSNAPLGPQFP | 392 | 56-70 | autologous | Topalian, 1996 |
| | | | | | | | tumor cells | |
| | | DR4 | 24 | SYLQDSDPDSFQD | 393 | 450-462 | autologous | Topalian, 1996 |
| | | | | | | | tumor cells | |
| | | DR15 | 20 | FLLHHAFVDSIFEQW | 394 | 386-406 | autologous | Kobayashi, 1998 |
| | | | | LQRHRP | | | tumor cells | |
| human | Differentiation | | | | | | | |
| chorionic | | | | | | | | |
| gonadotropin | | | | | | | | |
| P501s | Differentiation | Cw5 | | SACDVSVRVV | 395 | | Peptide | Friedman, 2004 |
| (prostein) | | Cw5 | | YTDFVGEGL | 396 | | peptide | Friedman, 2004 |

OVEREXPRESSED

| | | | | | | | | |
|---|---|---|---|---|---|---|---|---|
| ADAM17 | | A2 | | YLIELIDRV | 397 | | | Sinnathamby G, |
| | | | | | | | | 2011 |
| adipophilin | adipocytes, | A2 | 44 | SVASTITGV | 398 | 129-137 | peptide | Schmidt, 2004 |
| | macrophages | | | | | | | |
| ADP- | | A2 | | CITFQVWDV | 399 | | | Nonaka, 2002 |
| ribosylation | | A2 | | FLPHFQALHV | 400 | | | Nonaka, 2002 |
| factor | | | | | | | | |
| AIM-2 | ubiquitous | A1 | 26 | RSDSGQQARY | 401 | intron | autologous | Harada, 2001 |
| | (low level) | | | | | | tumor cells | |
| ALDH1A1 | mucosa, | A2 | 44 | LLYKLADLI | 402 | 88-96 | peptide | Visus, 2007 |
| | keratinocytes | | | | | | | |
| ALK | | A2 | | SLAMLDLLHV | 403 | | | Passoni, 2002 |
| ATIC (AICRT) | | A2 | | MVYDLYKTL | 404 | | | Shichijo, 2004 |
| | | A2 | | RLDFNLIRV | 405 | | | Shichijo, 2004 |
| BA46 (MFGE8) | | A2 | | GLQHWVPEL | 406 | | | Carmon, 2002 |
| | | A2 | | NLFETPVEA | 407 | | | Carmon, 2002 |
| BAP31 | | A2 | | KLDVGNAEV | 408 | | | Ramakrishna, 2003 |
| BAX-delta | | A2 | | YLLQGMIAAV | 409 | | | Maia, 2005 |
| | | A2 | | YLQGMIAAV | 410 | | | Maia, 2005 |
| Bcl-2 | | A2 | | PLFDFSWLSL | 411 | | | Andersen, 2005 |
| | | A2 | | WLSLKTLLSL | 412 | | | Andersen, 2005 |
| BCLX (L) | ubiquitous | A2 | 44 | YLNDHLEPWI | 413 | 173-182 | peptide | Sorensen, 2007 |
| | (low level) | | | | | | | |
| BING-4 | ubiquitous | A2 | 44 | CQWGRLWQL | 414 | ORF2 | anti-CD3 | Rosenberg, 2002 |
| | (low level) | | | | | | | |
| BTBD2 | | A24 | | VFLPCDSWNL | 415 | | | Yamada, 2003 |
| C19orf48 | | A2 | | CIPPDSLLFPA | 416 | | | Tykodi. S 2008 |
| CA125 | | A2 | | YTLDRDSLYV | 417 | | | Bellone, 2009 |
| Cadherin 3/P- | | A2 | | FIIENLKAA | 418 | | | Imai, 2008 |
| cadherin | | A2 | | FILPVLGAV | 419 | | | Imai, 2008 |
| CALCA | thyroid | A2 | 44 | VLLQAGSLHA | 420 | 16-25 | autologous | El Hage, 2008 |
| | | | | | | | tumor cells | |
| CLCA2 | | A2 | | LLGNCLPTV | 421 | | | Konopitzky, 2002 |
| | | A2 | | SLQALKVTV | 422 | | | Konopitzky, 2002 |
| CLP | | A2 | NLVRDD | | | | | Nakatsura, 2002 |
| | | | GSAV | | | | | |
| | | | (SEQ ID | | | | | |
| | | | NO: 13) | | | | | |
| | | A2 | RLFAFV | | | | | Nakatsura, 2002 |
| | | | RFT | | | | | |
| | | | (SEQ ID | | | | | |
| | | | NO: 14) | | | | | |
| | | A2 | VVQNFA | | | | | Nakatsura, 2002 |
| | | | KE FV | | | | | |
| | | | (SEQ ID | | | | | |
| | | | NO: 15) | | | | | |
| CD45 | proliferating | A24 | 20 | KFLDALISL | 423 | 556-564 | peptide | Tomita, 2011a |
| | cells, testis, | | | | | | | |
| | multiple | | | | | | | |
| | tissues (low | | | | | | | |
| | level) | | | | | | | |
| CD274 | multiple | A2 | 44 | LLNAFTVTV | 424 | 15-23 | peptide | Munir, 2012 |
| | tissues (lung, | | | | | | | |
| | heart, . . . ) | | | | | | | |
| | and | | | | | | | |
| | induced by | | | | | | | |
| | IFN-γ | | | | | | | |
| CDKN1A | | A2 | | FAWERVRGL | 425 | | | Li, 2006 |
| | | A2 | | GLGLPKLYL | 426 | | | Li, 2006 |
| | | A2 | | LMAGCIQEA | 427 | | | Li, 2006 |
| Cdr2 | | A2 | | LLEEMFLTV | 428 | | | Santomasso, 2007 |
| CPSF | ubiquitous | A2 | 44 | KVHPVIWSL | 429 | 250-258 | autologous | Maeda, 2002 |
| | (low level) | | | | | | tumor cells | |
| | | A2 | 44 | LMLQNALTTM | 430 | 1360-1369 | autologous | Maeda, 2002 |
| | | | | | | | tumor cells | |
| c-MET | | A2 | | YVDPVITSI | 431 | | | Schag, 2004 |
| COA-1 | | A2 | | FMTRKLWDL | 432 | | | Maccalli, 2008 |
| (UBXN11) | | A2 | | RLLASLQDL | 433 | | | Maccalli, 2008 |
| Cox2 | | A2 | | ALYGDIDAV | 434 | | | Gao, Y, 2009 |
| | | A3 | | ALYGDIDAV | 434 | | | Gao, Y, 2009 |
| Cyclin I | | A2 | | LLDRFLATV | 435 | | | Ramakrishna, 2003 |
| cyclin B1 | | A2 | | ILIDWLVQV | 436 | | | Andersen, 2011 |
| | | A2 | | AKYLMELTM | 437 | | | Kao, 2001 |
| | | A2 | | AGYLMELCC | 438 | | | Kao, 2001 |
| cyclin D1 | ubiquitous | A2 | 44 | LLGATCMFV | 439 | 101-109 | peptide | Kondo, 2008 |
| | (low level) | DR4 | 24 | NPPSMVAAGSVVA | 440 | 198-212 | peptide | Dengjel, 2004 |
| | | | | AV | | | | |
| cyclophilin B | | A2 | | VLEGMEVV | 441 | | | Tamura, 2001 |
| (Cyp-B) | | A2 | | KLKHYGPGWV | 442 | | | Tamura, 2001 |
| | | A24 | | DFMIQGGDF | 443 | | | Gomi, 1999 |
| | | A24 | | KFHRVIKDF | 444 | | | Gomi, 1999 |
| CYP1B1 | | A2 | | WLQYFPNPV | 445 | | | Maecker, 2005 |
| DKK1 | testis, | A2 | 44 | ALGGHPLLGV | 446 | 20-29 | peptide | Qian, 2007 |
| | prostate, | | | | | | | |
| | mesenchymal | | | | | | | |
| | stem cells | | | | | | | |
| EGFR | | A2 | | ITDFGLAKL | 447 | | | Filho, 2009 |
| | | A2 | | ITDFGLAKL | 447 | | | Filho, 2009 |
| ENAH (hMena) | breast, | A2 | 44 | TMNGSKSPV | 448 | 502-510 | peptide | Di Modugno, 2004 |
| | prostate | | | | | | | |
| | stroma and | | | | | | | |
| | epithelium of | | | | | | | |
| | colon-rectum, | | | | | | | |
| | pancreas, | | | | | | | |
| | endometrium | | | | | | | |
| EpCAM | epithelial cells | A2 | | YQLDPKFIV | 449 | | | Trojan, 2001 |
| | | A2 | | GLKAGVIAV | 450 | | | Nagorsen, 2000 |
| | | A2 | | ILYENNVITV | 451 | | | Trojan, 2001 |
| | | A2 | | ILYENNVIV | 452 | | | Trojan, 2001 |
| | | A24 | 20 | RYQLDPKFI | 453 | 173-181 | peptide | Tajima, 2004 |
| EphA2 | | A2 | | VLLLVLAGV | 454 | | | Tatsumi, 2003 |
| | | A2 | | TLADFDPRV | 455 | | | Tatsumi, 2003 |
| | | A2 | | VLAGVGFFI | 456 | | | Alves, 2003; Easty |
| | | | | | | | | 1995 |
| | | A2 | | IMNDMPIYM | 457 | | | Alves, 2003; Easty |
| | | | | | | | | 1995 |
| EphA3 | many | DR11 | 25 | DVTFNIICKKCG | 458 | 356-367 | autologous | Chiari, 2000 |
| | | | | | | | tumor cells | |
| EZH2 | ubiquitous | A2 | 44 | FMVEDETVL | 459 | 120-128 | peptide | Itoh, 2007 |
| | (low level) | A2 | 44 | FINDEIFVEL | 460 | 165-174 | peptide | Itoh, 2007 |
| | | A24 | 20 | KYDCFLHPF | 461 | 291-299 | peptide | Ogata, 2004 |
| | | A24 | 20 | KYVGIEREM | 462 | 735-743 | peptide | Ogata, 2004 |
| FGF5 | brain, kidney | A3 | 22 | NTYASPRFKf | 463 | 172-176 | autologous | Hanada, 2004 |
| | | | | | | and | tumor cells | |
| | | | | | | 217-220 | | |
| glypican-3 | placental and | A2 | 44 | FVGEFFTDV | 464 | 144-152 | peptide | Komori, 2006 |
| | multiple | A24 | 20 | EYILSLEEL | 465 | 298-306 | peptide | Komori, 2006 |
| | tissues | | | | | | | |
| G250/MN/ | stomach, liver, | A2 | 44 | HLSTAFARV | 466 | 254-262 | peptide | Vissers, 1999 |
| CAIX | pancreas | | | | | | | |
| HBD | | A24 | | KYLKLSSSEL | 467 | | | Yamada, 2003 |
| hCG-beta | | A2 | | TMTRVLQGV | 468 | | | Dangles, 2002 |
| | | A2 | | GVNPVVSYAV | 469 | | | Dangles, 2002 |
| | | A2 | | VLQVGLPAL | 470 | | | Dangles, 2002 |
| Heparanase | | A2 | | PAFSYSFFV | 471 | | | Chen T, 2008 |
| | | A2 | | LLLGPLGPL | 472 | | | Sommerfeldt, 2006 |
| | | A2 | | KMLKSFLKA | 473 | | | Chen T, 2008 |
| | | A2 | | ALPPPLMLL | 474 | | | Sommerfeldt, 2006 |
| | | A2 | | WLSLLFKKL | 475 | | | Chen T, 2008 |
| HER2/neu | ubiquitous | A2 | 44 | KIFGSLAFL | 476 | 369-377 | autologous | Fisk, 1995 |
| | (low level) | | | | | | tumor cells | |
| | | A2 | 44 | IISAVVGIL | 477 | 654-662 | peptide | Brossart, 1998 |
| | | A2 | 44 | ALCRWGLLL | 478 | 13-May | peptide | Kawashima, 1998 |
| | | A2 | 44 | ILHNGAYSL | 479 | 435-443 | peptide | Kawashima, 1998 |
| | | A2 | 44 | RLLQETELV | 480 | 689-697 | peptide | Rongcun, 1999 |
| | | A2 | 44 | VVLGVVFGI | 481 | 665-673 | peptide | Rongcun, 1999 |
| | | A2 | 44 | YMIMVKCWMI | 482 | 952-961 | peptide | Rongcun, 1999 |
| | | A2 | 44 | HLYQGCQVV | 483 | 48-56 | peptide | Scardino, 2001 |
| | | A2 | 44 | YLVPQQGFFC | 484 | 1023-1032 | peptide | Scardino, 2001 |
| | | A2 | 44 | PLQPEQLQV | 485 | 391-399 | peptide | Scardino, 2002 |
| | | A2 | 44 | TLEEITGYL | 486 | 402-410 | peptide | Scardino, 2002 |
| | | A2 | 44 | ALIHHNTHL | 487 | 466-474 | peptide | Scardino, 2002 |
| | | A2 | 44 | PLTSIISAV | 488 | 650-658 | peptide | Scardino, 2002 |
| | | A2 | | KLFGSLAFV | 489 | | | Keogh, 2001 |
| | | A2 | | ITDFGLARL | 490 | | | Filho, 2009 |
| | | A2 | | KVFGSLAFV | 491 | | | Keogh, 2001 |
| | | A2 | | AVVGILLVV | 492 | | | Gritzapis, 2009 |
| | | A2 | | QLFEDNYAL | 493 | | | Kono, 1998 |
| | | A2 | | QIAKGMSYL | 494 | | | Lekka, 2009 |
| | | A2 | | LIAHNQVRQV | 495 | | | Gritzapis, 2008 |
| | | A3 | 22 | VLRENTSPK | 496 | 754-762 | peptide | Kawashima, 1999 |
| | | A24 | 20 | TYLPTNASL | 497 | 63-71 | peptide | Okugawa, 2000 |
| HIFPH3 | | A24 | | RYAMTVWYF | 498 | | | Sato, 2008 |
| HLA-DOB | B | A2 | 44 | FLLGLIFLL | 499 | 232-240 | peptide | Kang, 2013 |
| | lymphocytes, | | | | | | | |
| | monocytes, | | | | | | | |
| | blood cells, | | | | | | | |
| | adrenals, . . . | | | | | | | |
| HM1.24 | | A2 | | LLLGIGILV | 500 | | | Hundemer, 2006 |
| HMW-MAA | | A2 | | LLQLGYSGRL | 501 | | | Murray, 2004 |
| | | A2 | | LLQLYSGRL | 502 | | | Murray, 2004 |
| Hepsin | kidney, liver, | A2 | 44 | SLLSGDWVL | 503 | 191-199 | peptide | Guo, 2013 |
| | skin, . . . | A2 | 44 | GLQLGVQAV | 504 | 229-237 | peptide | Guo, 2013 |
| | | A2 | 44 | PLTEYIQPV | 505 | 268-276 | peptide | Guo, 2013 |
| HO-1 | | B8 | | APLLRWVL | 506 | | | Flad, 2006 |
| Hsp70 | | A2 | | LLLLDVAPL | 507 | | | Faure, 2004 |
| | | A2 | | LLDVAPLSL | 508 | | | Faure, 2004 |
| HST-2 (FGF-6) | | A31 | | YSWMDISCWI | 509 | | | Suzuki, 1999 |
| ICE | | B7 | | SPRWWPTCL | 510 | | | Ronsin C. 1999 |
| IDO1 | lymph nodes, | A2 | 44 | ALLEIASCL | 511 | 199-207 | peptide | Sorensen, 2009 |
| | placenta, and | | | | | | | |
| | many cell | | | | | | | |
| | types in the | | | | | | | |
| | course of | | | | | | | |
| | inflammatory | | | | | | | |
| | response | | | | | | | |
| IEX-1 | | A11 | | APAGRPSASR | 512 | | | Matsueda, 2007 |
| | | A11 | | RSRRVLYPR | 513 | | | Matsueda, 2007 |
| | | A31 | | RSRRVLYPR | 513 | | | Matsueda, 2007 |
| | | A31 | | APAGRPSASR | 512 | | | Matsueda, 2007 |
| | | A33 | | RSRRVLYPR | 513 | | | Sasada, 2004 |
| | | A33 | | APAGRPSAS | 514 | | | Sasada, 2004 |
| | | A33 | | vlyprvvrr | 515 | | | Sasada, 2004 |
| IGF2B3 | ubiquitous | A2 | 44 | NLSSAEVVV | 271 | 515-523 | peptide | Tomita, 2011b |
| | (low level) | A3 | 44 | RLLVPTQFV | 270 | 199-207 | peptide | Tomita, 2011b |
| IL13Ralpha2 | | A2 | 44 | WLPFGFILI | 516 | 345-353 | peptide | Okano, 2002 |
| | | A24 | | WYEGLDHAL | 517 | | | Shimato, 2008 |
| integrin beta | | A2 | | ALMEQQHYV | 518 | | | Ramakrishna, 2003 |
| subunit | | | | | | | | |
| Intestinal | liver, | B7 | 17 | SPRWWPTCL | 510 | alt. ORF | autologous, | Ronsin, 1999 |
| carboxyl | intestine | | | | | | tumor cells | |
| esterase | kidney | | | | | | | |
| alpha- | liver | A2 | 44 | GVALQTMKQ | 519 | 542-550 | adenovirus- | Butterfield, 1999 |
| foetoprotein | | | | | | | dendritic cells | |
| | | A2 | 44 | FMNKFIYEI | 520 | 158-166 | peptide | Pichard, 2008 |
| | | A2 | | GLSPNLNRFL | 521 | | | Butterfield, 2001 |
| | | A2 | | PLFQVPEPV | 522 | | | Butterfield, 2001 |
| | | A3 | | ILLWAARYD | 523 | | | Liu Y, 2006 |
| | | A24 | | EYSRRHPQL | 524 | | | Mizukoshi, 2006 |
| | | A24 | | AYTKKAPQL | 525 | | | Mizukoshi, 2006 |
| | | A24 | | EYYLQNAFL | 526 | | | Mizukoshi, 2006 |
| | | A24 | | KYIQESQAL | 527 | | | Mizukoshi, 2006 |
| | | A24 | | RSCGLFQKL | 528 | | | Mizukoshi, 2006 |
| | | DR13 | 19 | QLAVSVILRV | 529 | 364-373 | peptide | Alisa, 2005 |
| JARID1B | | A2 | | QLYALPCVL | 530 | | | Coleman, JA, 2010 |
| Keratin 18 | | A2 | | ALLNIKVKL | 531 | | | Weinschenk, 2002 |
| Kallikrein 4 | prostate and | A2 | 44 | FLGYLILGV | 532 | 19-Nov | peptide | Wilkinson, 2012 |
| | ovarian cancer | DP4 | 75 | SVSESDTIRSISIAS | 533 | 125-139 | peptide | Hural, 2002 |
| | | DR4 | 24 | LLANGRMPTVLQCVN | 534 | 155-169 | peptide | Hural, 2002 |
| | | DR7 | 25 | RMPTVLQCVNVSVVS | 535 | 160-174 | peptide | Hural, 2002 |
| KIF20A | ubiquitous | A2 | 44 | LLSDDDVVV | 536 | 20-Dec | peptide | Imai, 2011 |
| | (low level) | A2 | 44 | AQPDTAPLPV | 537 | 284-293 | peptide | Imai, 2011 |
| | | A2 | 44 | CIAEQYHTV | 538 | 809-817 | peptide | Imai, 2011 |
| L10a | | A26 | | ETVELQISL | 539 | | | Koga, 2003 |
| | | A26 | | TLYEAVREV | 540 | | | Koga, 2003 |
| Lck | | A2 | | KLVERLGAA | 541 | | | Imai, 2001 |
| | | A2 | | DVWSFGILL | 542 | | | Imai, 2001 |
| | | A24 | | TFDYLRSVL | 543 | | | Harashima, 2001 |
| | | A24 | | HYTNASDGL | 544 | | | Harashima, 2001 |
| | | A24 | | DYLRSVLEDF | 545 | | | Harashima, 2001 |
| Livin (ML-IAP) | | A2 | | QLCPICRAPV | 546 | | | Andersen, 2004 |
| | | A2 | | RLASFYDWLP | 547 | | | Schmollinger, 2003 |
| | | A2 | | SLGSPVLGL | 548 | | | Schmollinger, 2003 |
| LRRC8A | | B7 | | GPRESRPPA | 549 | | | Baba, T; 2010 |
| Lengsin | eye lens and | A2 | 44 | FLPEFGISSA | 550 | 270-279 | peptide | Nakatsugawa, 2011 |
| | low level in | | | | | | | |
| | multiple | | | | | | | |
| | tissues | | | | | | | |
| M2BP | | A2 | | RIDITLSSV | 551 | | | Ozaki, 2004 |
| | | A24 | | GYCASLFAIL | 552 | | | Kontani, 2004 |
| M-CSF | liver, kidney | B35 | 20 | LPAVVGLSPGEQEY | 553 | alt. ORF | autologous | Probst-Kepper, |
| | | | | | | | tumor cells | 2001 |
| MCSP | endothelial | DR11 | 25 | VGQDVSVLFRVTGA | 554 | 693-708 | peptide | Erfurt, 2007 |
| | cells, | | | LQ | | | | |
| | chondrocytes, | | | | | | | |
| | smooth | | | | | | | |
| | muscle cells | | | | | | | |
| mdm-2 | ubiquitous | A2 | 44 | VLFYLGQY | 555 | 53-60 | tumor lysate- | Asai, 2002 |
| | (brain, | | | | | | pulsed APCs | |
| | muscle, lung) | A2 | | LLGDLFGV | 556 | | | Mayr, 2006 |
| Meloe | ubiquitous | A2 | 44 | TLNDECWPA | 557 | 36-44 | tumor- | Godet, 2008 |
| | (low level) | | | | | | infiltrating | |
| | | | | | | | lymphocytes | |
| | | DQ2 | 41 | ERISSTLNDECWPA | 558 | 31-44 | peptide/protein | Bobinet, 2012 |
| | | DQ6 | 63 | FGRLQGISPKI | 236 | 32-44 | peptide | Rogel, 2011 |
| | | DR1 | 18 | TSREQFLPSEGAA | 559 | 23-Nov | peptide/protein | Bobinet, 2012 |
| | | DR11 | 25 | CPPWHPSERISSTL | 560 | 24-37 | peptide | Rogel, 2011 |
| Meloe-2 | | A2 | | RLPPKPPLA | 561 | | | Godet, 2010 |
| | | A2 | | RCPPKPPLA | 562 | | | Godet, 2010 |
| MG50 | | A2 | | TLKCDCEIL | 563 | | | Mitchell, 2000 |
| | | A2 | | RLGPTLMCL | 564 | | | Mitchell, 2000 |
| | | A2 | | LLLEAVPAV | 565 | | | Mitchell, 2000 |
| | | A2 | | WLPKILGEV | 566 | | | Mitchell, 2000 |
| | | A2 | | VLSVNVPDV | 567 | | | Mitchell, 2000 |
| | | A2 | | CMHLLLEAV | 568 | | | Mitchell, 2000 |
| Midkine | ubiquitous | A2 | 44 | ALLALTSAV | 569 | 13-21 | peptide | Kerzerho, 2010 |
| | (low level) | | | | | | | |
| | | A2 | 44 | AQCQETIRV | 570 | 114-122 | peptide | Kerzerho, 2010 |
| | | DR4 | 24 | LTLLALLALTSAVAK | 571 | 23-Sep | peptide | Kerzerho, 2013 |
| MMP-2 | ubiquitous | A2 | 44 | GLPPDVQRVh | 572 | 560-568 | autologous | Godefroy, 2005 |
| | | | | | | | tumor cells | |
| MMP-7 | ubiquitous | A3 | 22 | SLFPNSPKWTSK | 573 | 96-107 | peptide | Yokoyama, 2008 |
| | (low level) | | | | | | | |
| MPP-11 | | A2 | | QLLIKAVNL | 574 | | | Siegel S, 2010 |
| | | A2 | | STLCQVEPV | 575 | | | AI Qudaihi, 2010 |
| MRP3 | | A24 | | AYVPQQAWI | 576 | | | Yamada, 2001 |
| | | A24 | | VYSDADIFL | 577 | | | Yamada, 2001 |
| | | A24 | | NYSVRYRPGL | 578 | | | Yamada, 2001 |
| | | A24 | | LYAWEPSFL | 579 | | | Yamada, 2001 |
| MUC1 | glandular | A2 | 44 | STAPPVHNV | 580 | 950-958 | peptide | Brossart, 1999 |
| | epithelia | A2 | 44 | LLLLTVLTV | 581 | 20-Dec | peptide | Brossart, 1999 |
| | | A11 | | STAPPAHGV | 582 | | | Domenech, 1995 |
| | | A68 | | DVTSAPDNK | 583 | | | Kapp, 2009 |
| | | B7 | | VPGWGIALL | 584 | | | Kapp, 2009 |
| | | B7 | | DPSTDYYQEL | 585 | | | Kapp, 2009 |
| | | B44 | | TEAASRYNL | 586 | | | Kapp, 2009 |
| | | DR3 | 21 | PGSTAPPAHGVT | 587 | repeated | peptide | Hiltbold, 1998 |
| | | | | | | region | | |
| MUC5AC | surface | A24 | 20 | TCQPTCRSL | 588 | 716-724 | peptide | Yamazoe, 2011 |
| | mucosal cells, | | | | | | | |
| | respiratory | | | | | | | |
| | tract, and | | | | | | | |
| | stomach | | | | | | | |
| | epithelia | | | | | | | |
| Nucleophosmin | | A1 | | GCELKADKDY | 589 | | | Swoboda, 2010 |
| P15 | | A24 | | AYGLDFYIL | 590 | | | Robbins, 1995 |
| p53 | ubiquitous | A2 | 44 | LLGRNSFEV | 591 | 264-272 | peptide | Ropke, 1996 |
| | (low level) | A2 | 44 | RMPEAAPPV | 592 | 65-73 | peptide | Barfoed, 2000 |
| | | A2 | | LLPENNVLSPV | 593 | | | Keogh, 2001 |
| | | A2 | | SLPPPGTRV | 594 | | | |
| | | A2 | | VVPCEPPEV | 84 | | | Ito, 2007 |
| | | A2 | | YLGSYGFRL | 595 | | | |
| | | A2 | | SMPPPGTRV | 596 | | | Keogh, 2001 |
| | | A2 | | GLAPPQHLIRV | 597 | | | |
| | | A2 | | KLCPVQLWV | 598 | | | Keogh, 2001 |
| | | A2 | | KTCPVQLWV | 599 | | | Wurtzen, 2002 |
| | | A24 | | AIYKQSQHM | 600 | | | Umano, 2001 |
| | | B46 | 0.1 | SQKTYQGSY | 601 | 99-107 | autologous | Azuma, 2003 |
| | | | | | | | tumor cells | |
| | | Cw7 | | TRVLAMAIY | 602 | | | Ichiki, 2004 |
| | | DP5 | 3 | PGTRVRAMAIYKQ | 603 | 153-165 | peptide | Fujita, 1998 |
| | | DR14 | 6 | HLIRVEGNLRVE | 604 | 193-204 | peptide | Fujita, 1998 |
| PAK2 | | A2 | | KLAKPLSSL | 605 | | | Li, 2006 |
| | | A2 | | VLLGMEGSV | 606 | | | Li, 2006 |
| Papillomavirus binding | | A2 | | ALPSFQIPV | 607 | | | Tsukahara, 2009 |
| PAX3 | | A2 | | QLMAFNHLV | 608 | | | Rodeberg, 2006 |
| PAX5 | hemopoietic | A2 | 44 | TLPGYPPHV | 609 | 311-319 | peptide | Yan, 2008 |
| | system | | | | | | | |
| PBF | ovary, | B55 | 4 | CTACRWKKACQR | 610 | 499-510 | autologous | Tsukahara, 2004 |
| | pancreas, | | | | | | tumor cells | |
| | spleen, liver | | | | | | | |
| PGK1 | | A2 | | IIGGGMAFT | 611 | | | Shichijo, 2004 |
| PRAME | testis, ovary, | A2 | 44 | VLDGLDVLL | 612 | 100-108 | peptide | Kessler, 2001 |
| | endometrium, | A2 | 44 | SLYSFPEPEA | 613 | 142-151 | peptide | Kessler, 2001 |
| | adrenals | A2 | 44 | ALYVDSLFFL | 614 | 300-309 | peptide | Kessler, 2001 |
| | | A2 | 44 | SLLQHLIGL | 615 | 425-433 | peptide | Kessler, 2001 |
| | | A24 | 20 | LYVDSLFFLc | 616 | 301-309 | autologous | Ikeda, 1997 |
| | | | | | | | tumor cells | |
| | | B52 | | GQHLHLETF | 617 | | | Kawahara, 2006 |
| PRDI-BF1 | | A2 | | FGLFPRLCPV | 618 | | | Lotz, 2005 |
| Preprocalcitonin | | A2 | | VLLQAGSLHA | 420 | | | EI Hage, 2008 |
| (ppCT) | | | | | | | | |
| Prostatic acid | | ALDVYN | | | | | | Olson, 2010 |
| | | GLL | | | | | | |
| | | (SEQ ID | | | | | | |
| | | NO: 8) | | | | | | |
| | | FLFLLFF | | | | | | Olson, 2010 |
| | | WL (SEQ | | | | | | |
| | | ID NO: | | | | | | |
| | | 9) | | | | | | |
| | | TLMSA | | | | | | Olson, 2010 |
| | | MTNL | | | | | | |
| | | (SEQ ID | | | | | | |
| | | NO: 10) | | | | | | |
| | | ILLWQPI | | | | | | Machlenkin, 2005 |
| | | PV (SEQ | | | | | | |
| | | ID NO: | | | | | | |
| | | 11) | | | | | | |
| | | YLPFRN | | | | | | Terasaki, 2009 |
| | | CRP | | | | | | |
| | | (SEQ ID | | | | | | |
| | | NO: 12) | | | | | | |
| | | YLPFRN | | | | | | Terasaki, 2009 |
| | | CRP | | | | | | |
| | | (SEQ ID | | | | | | |
| | | NO: 12) | | | | | | |
| PSMA | prostate, CNS, | A1 | | HSTNGVTRIY | 619 | | | Corman, 1998 |
| | liver | A2 | | VLAGGFFLL | 620 | | | Lu, 2002 |
| | | A24 | | LYSDPADYF | 621 | | | Horiguchi, 2003 |
| | | A24 | 20 | NYARTEDFF | 622 | 178-186 | peptide | Horiguchi, 2002 |
| RAGE-1 | retina | A2 | 44 | LKLSGVVRL | 623 | 352-360 | peptide | Oehlrich, 2005 |
| | | A2 | 44 | PLPPARNGGLg | 624 | 32-40 | peptide | Oehlrich, 2005 |
| | | B7 | 17 | SPSSNRIRNT | 625 | 20-Nov | autologous | Gaugler, 1996 |
| | | | | | | | tumor cells | |
| Ran | | A2 | | YMFDVTSRV | 626 | | | Li, 2009 |
| | | A2 | | IMFDVTSRV | 627 | | | Li, 2009 |
| | | A33 | | HPLVFHTNR | 628 | | | Azuma, 2004 |
| | | A33 | | IIMFDVTSR | 629 | | | Azuma, 2004 |
| RGS5 | heart, skeletal | A2 | 44 | LAALPHSCL | 630 | 13-May | peptide | Boss, 2007 |
| | muscle, | A3 | 22 | GLASFKSFLK | 631 | 74-83 | peptide | Boss, 2007 |
| | pericytes | B8 | | MAQKRIHAL | 632 | | | Flad, 2006 |
| Ribosomal | | A31 | | KNKRILMEH | 633 | | | Kuroda, 2010 |
| protein L19 | | | | | | | | |
| RhoC | ubiquitous | A3 | 22 | RAGLQVRKNK | 634 | 176-185 | peptide | Wenandy, 2008 |
| | (low level) | | | | | | | |
| RNF43 | | A2 | 44 | ALWPWLLMA(T) | 635 | 11-19(20) | peptide | Uchida, 2004 |
| | | A24 | 20 | NSQPVWLCL | 636 | 721-729 | peptide | Uchida, 2004 |
| RU2AS | testis, kidney, | B7 | 17 | LPRWPPPQL | 637 | antisense | autologous | Van Den Eynde, |
| | bladder | | | | | | tumor cells | 1999 |
| SART-2 | | A24 | | DYSARWNEI | 638 | | | Nakao, 2000 |
| | | A24 | | AYDFLYNYL | 639 | | | Nakao, 2000 |
| | | A24 | | SYTRLFLIL | 640 | | | Nakao, 2000 |
| secernin 1 | ubiquitous | A2 | 44 | KMDAEHPEL | 641 | 196-204 | peptide | Suda, 2006 |
| SH3GLB2 | | A2 | | FLTPLRNFL | 642 | | | Fasso, 2008 |
| SOX4 | | Cw*1402 | | | | | | Friedman, 2004 |
| SOX10 | ubiquitous | A2 | 44 | AWISKPPGV | 643 | 332-340 | tumor- | Khong, 2002 |
| | (low level) | | | | | | infiltrating | |
| | | | | | | | lymphocytes | |
| | | A2 | 44 | SAWISKPPGV | 644 | 331-340 | tumor- | Khong, 2002 |
| | | | | | | | infiltrating | |
| | | | | | | | lymphocytes | |
| SPARC | | A24 | | MYIFPVHWQF | 645 | | | Inoue M, 2010 |
| | | A24 | | DYIGPCKYI | 646 | | | Inoue M, 2010 |
| STAT1- | | A2 | | KLQELNYNL | 647 | | | Ramakrishna, 2003 |
| alpha/beta | | | | | | | | |
| STEAP1 | prostate | A2 | 44 | MIAVFLPIV | 648 | 292-300 | peptide | Rodeberg, 2005 |
| | | A2 | | FLYTLLREV | 649 | | | Alves 2006 |
| | | A2 | | LLLGTIHAL | 650 | | | Machlenkin, 2005 |
| | | A2 | 44 | HQQYFYKIPILVINK | 651 | 102-116 | peptide | Kobayashi, 2007 |
| survivin | ubiquitous | A2 | 44 | ELTLGEFLKL | 652 | 95-104 | peptide/ | Schmitz, 2000 |
| | | | | | | | protein | Schmidt, 2003 |
| | | A2 | | QMFFCFKEL | 653 | | | Ciesielski, 2010 |
| | | A2 | | LMLGEFLKL | 654 | | | Andersen, 2001 |
| | | A2 | | TLPPAWQPFL | 655 | | | Schmitz, 2000 |
| | ubiquitous | DR1 | 18 | TLGEFLKLDRERAKN | 656 | 97-111 | peptide/ | Widenmeyer, 2012 |
| | | | | | | | protein | |
| survivin-2B | | A24 | | AYACNTSTL | 657 | | | Hirohashi, 2002 |
| Telomerase | testis, thymus, | A2 | 44 | ILAKFLHWL | 658 | 540-548 | peptide | Vonderheide, 1999 |
| | bone marrow, | A2 | 44 | RLVDDFLLV | 659 | 865-873 | peptide | Minev, 2000 |
| | lymph nodes | A2 | | LLTSRLRFI | 660 | | | Oslo, unpublished |
| | | | | | | | | data |
| | | A2 | | RLFFYRKSV | 661 | | | Hernandez, 2002 |
| | | A3 | | KLFGVLRLK | 662 | | | Vonderheide, 2001 |
| | | DR7 | 25 | RPGLLGASVLGLDDI | 663 | 672-686 | peptide | Schroers, 2002 |
| | | DR11 | 25 | LTDLQPYMRQFVAHL | 664 | 766-780 | peptide | Schroers, 2003 |
| Tie2 | | A2 | | FLPATLTMV | 665 | | | Ramage, 2004 |
| Topoisomerase | | A2 | | FLYDDNQRV | 666 | | | Ramakrishna, 2003 |
| II | | | | | | | | |
| TRG | | B52 | | YQLCLTNIF | 667 | | | Ohkouchi, 2003 |
| | | B62 | | YQLCLTNIF | 667 | | | Ohkouchi, 2003 |
| TPBG | multiple | A2 | 44 | RLARLALVL | 253 | 17-25 | peptide | Tykodi, 2012 |
| | tissues | | | | | | | |
| | (esophagus, | | | | | | | |
| | bladder, . . . ) | | | | | | | |
| TYMS | | A2 | | LMALPPCHAL | 668 | | | Shichijo, 2004 |
| VEGF | ubiquitous | B27 | 7 | SRFGGAVVR | 669 | -i | peptide | Weinzierl, 2008 |
| | (low level) | | | | | | | |
| VEGFR2/KDR | | A2 | | FLSTLTIDGV | 670 | | | Sun, 2006 |
| WHSC2 | | A26 | | ASLDSDPWV | 671 | | | Niu, 2009 |
| WNK2/ppMAP | | A26 | | DLLSHAFFA | 672 | | | Niu, 2009 |
| kkk | | | | | | | | |
| WT1 | testis, ovary, | A1 | 26 | TSEKRPFMCAY | 673 | 317-327 | peptide | Asemissen, 2006 |
| | bone marrow, | A2 | | RMFPNAPYL | 674 | | | Oka, 2000 |
| | spleen | A2 | | YMFPNAPYL | 675 | | | May, 2007 |
| | | A24 | 20 | CMTWNQMNL | 676 | 235-243 | peptide | Ohminami, 2000 |
| | | A24 | | CYTWNQMNL | 677 | | | Tsuboi, 2002 |
| | | A24 | | RWPSCQKKF | 678 | | | Azuma, 2002 |
| | | DP5 | 3 | LSHLQMHSRKH | 679 | 337-347 | peptide | Guo, 2005 |
| | | DP5 | 3 | KRYFKLSHLQMHSR | 680 | 332-347 | peptide | Lin, 2013 |
| | | | | KH | | | | |
| | | DR4 | 24 | KRYFKLSHLQMHSR | 680 | 332-347 | peptide | Fujiki, 2007 |
| | | | | KH | | | | |
| XBP1 | | A2 | | LLSGQPASA | 681 | | | Lotz, 2005 |
| CD33 | | | | | | | | |
| CD123 | | | | | | | | |
| CD38 | | | | | | | | |
| gastrin-17 | | | | | | | | |
| guanylyl | | | | | | | | |
| cyclase C | | | | | | | | |

Other

| | | | | | |
|---|---|---|---|---|---|
| HNRPL | A26 | NVLHFFNAPL | 682 | | Niu, 2009 |
| EHD2 | A3 | KLPNSVLGR | 683 | | Dorrschuck, 2004 |
| 707-AP | A2 | RVAALARDAP | 684 | | Morioka, 1995 |
| mAb MF11-30 | A2 | LLVLLYSKL | 685 | | Murray, 2004 |
| VH | | | | | |
| Replication | A2 | YLMDTSGKV | 686 | | Ramakrishna, 2003 |
| protein A | | | | | |
| RU1 | B51 | VPYGSFKHV | 687 | | Morel, 2000 |
| septin 2, | A2 | RLYPWGVVEV | 688 | | Ramakrishna, 2003 |
| Nedd5 | | | | | |
| SGT1B | B39 | CHILLGNYC | 689 | | So, 2005 |
| MOG | | MEVGWYRSPFSRV | 690 | 35-55 | |
| | | VHLYRNGK | | | |

Virus Related Epitopes

| | | | | |
|---|---|---|---|---|
| Epstein Barr | A2 | CLGGLLTMV | 691 | |
| Virus | A2 | GLCTLVAML | 692 | |
| | A2 | FLYALALLL | 693 | |
| | A2 | YVLDHLIVV | 694 | |
| | A3 | RLRAEAQVK | 695 | |
| | A11 | AVFDRKSDAK | 696 | |
| | B7 | RPPIFIRLL | 697 | |
| | A2 | VLQWASLAV | 698 | |
| | | FMVFLQTHI | 699 | |
| | | FLQTHIFAEV | 700 | |
| | | SIVCYFMVFL | 701 | |
| Cytomegalo- | A1 | YSEHPTFTSQY | 702 | |
| virus | A1 | VTEHDTLLY | 703 | |
| | A2 | NLVPMVATV | 704 | |
| | A2 | VLEETSVML | 705 | |
| | A3 | TTVYPPSSTAK | 706 | |
| | A11 | GPISGHVLK | 707 | |
| | B7 | TPRVTGGGAM | 708 | |
| | B7 | RPHERNGFTV | 709 | |
| Influenza virus | A1 | VSDGGPNLY | 710 | |
| | A2 | GILGFVFTL | 711 | |
| Human | A2 | TIHDIILECV | 712 | 29-38 |
| papilloma virus | A2 | YMLDLQPET | 713 | 11-19 |
| | A2 | YMLDLQPETT | 714 | 11-20 |

[0226] In other embodiments, the antigenic polypeptide is an antigenic polypeptide from any one of the antigens disclosed herein. For example, in some embodiments the antigenic polypeptide is an antigenic polypeptide from an antigen selected from the antigens disclosed in Tables 1 and 14-24. In some embodiments, the antigenic polypeptide is an antigenic polypeptide from an antigen selected from the antigens disclosed in Table 16. In some embodiments, the antigenic polypeptide is an antigenic polypeptide from an antigen selected from the antigens disclosed in Table 17. In some embodiments, the antigenic polypeptide is an antigenic polypeptide from an antigen selected from the antigens disclosed in Table 18. In some embodiments, the antigenic polypeptide is an antigenic polypeptide from an antigen selected from the antigens disclosed in Table 19. In some embodiments, the antigenic polypeptide is an antigenic polypeptide from an antigen selected from the antigens disclosed in Table 20. In some embodiments, the antigenic polypeptide is an antigenic polypeptide from an antigen selected from the antigens disclosed in Table 21. In some embodiments, the antigenic polypeptide is an antigenic polypeptide from an antigen selected from the antigens disclosed in Table 22 In some embodiments, the antigenic polypeptide is an antigenic polypeptide from an antigen selected from the antigens disclosed in Table 23 In some embodiments, the antigenic polypeptide is an antigenic polypeptide from an antigen selected from the antigens disclosed in Table 24.

[0227] An exemplary antigenic polypeptide, e.g. a human polypeptide, selected from Table 1, or from Tables 14-24 includes:

[0228] a) a naturally occurring form of the human polypeptide, e.g., a naturally occurring form of the human polypeptide that is not associated with a disease state;

[0229] b) the human polypeptide having a sequence appearing in a database, e.g., GenBank database, on Dec. 22, 2017, for example a naturally occurring form of the human polypeptide that is not associated with a disease state having a sequence appearing in a database, e.g., GenBank database, on Dec. 22, 2017;

[0230] c) a human polypeptide having a sequence that differs by no more than 1, 2, 3, 4, 5 or 10 amino acid residues from a sequence of a) or b);

[0231] d) a human polypeptide having a sequence that differs at no more than 1, 2, 3, 4, 5 or 10% its amino acids residues from a sequence of a) or b);

[0232] e) a human polypeptide having a sequence that does not differ substantially from a sequence of a) or b); or

[0233] f) a human polypeptide having a sequence of c), d), or e) that does not differ substantially in a biological activity, e.g., an enzymatic activity (e.g., specificity or turnover) or binding activity (e.g., binding specificity or affinity) from a human polypeptide having the sequence of a) or b). Candidate peptides under f) can be made and screened for similar activity as described herein and would be equivalent hereunder if expressed in engineered erythroid cells as described herein).

[0234] In embodiments, an exogenous antigenic polypeptide comprises a human polypeptide or fragment thereof, e.g., all or a fragment of a human polypeptide of a), b), c), d), e), or f) of the preceding paragraph. In an embodiment, the exogenous polypeptide comprises a fusion polypeptide comprising all or a fragment of a human polypeptide of a), b), c), d), e), or f) of the preceding paragraph and additional amino acid sequence. In an embodiment the additional amino acid sequence comprises all or a fragment of human polypeptide of a), b), c), d), e), or f) of the preceding paragraph for a different human polypeptide.

[0235] In certain embodiments, the exogenous antigenic polypeptides are presented on antigen-presenting polypeptides, e.g., the exogenous antigenic polypeptide is specifically bound to the exogenous antigen-presenting polypeptides, e.g. histocompatibility molecules (MHCI or MHCII).

[0236] In some embodiments, the exogenous antigenic polypeptide is 8 amino acids in length to 24 amino acids in length, for example 8, 9, 10, 11, 12, 13, 14, 15, 16, 17, 18, 19, 20, 21, 22, 23, or 24 amino acids in length. In further embodiments, a cleavable site is introduced into the exogenous antigenic polypeptide.

[0237] MAGE-A

[0238] MAGE-A antigens are expressed in a variety of cancers of diverse histological origin and germinal cells. MAGE-A antigens belong to the larger family of cancer/testis antigens (CTA), whose expression is consistently detected in cancers of different histological origin and germinal cells (Simpson et al. Nat Rev Cancer. 2005 August; 5(8):615-25). The MAGE-A gene family has 12 members (MAGE-A1, MAGE-A2, MAGE-A3, MAGE-A4, MAGE-A5, MAGE-A6, MAGE-A7, MAGE-A8, MAGE-A9, MAGE-A10, MAGE-A11, MAGE-A12) located on chromosome Xq28 (Chomez et al., Cancer Res. 2001 Jul. 15; 61(14):5544-51; DePlaen et al., Immunogenetics. 1994; 40(5):360-9). MAGE-A1, -A2, -A3, -A4, -A6, -A10, and -A12 are expressed in a significant proportion of primary and metastatic tumors of various histological types and are targets of tumor antigen-specific cytotoxic T lymphocytes. Individual MAGE-A expression varies from one tumor type to the other but, overall, the large majority of tumors express at least one MAGE-A antigen. Specific gene products have been identified by immunohistochemistry in cancers of different histological origin, including high percentages of non-small cell lung cancers (NSCLC), bladder cancers, esophageal and head and neck cancers, myeloma, sarcomas, and triple negative breast cancers (Juretic et al. Lancet Oncol. 2003 February; 4(2):104-9; Curigliano et al., Ann Oncol. 2011 January; 22(1):98-103; vanBaren et al., Ann Oncol. 2011 January; 22(1):98-103; Antonescu et al., Hum Pathol. 2002 February; 33(2):225-9).

[0239] In some embodiments, an artificial antigen presenting cell (aAPC) of the present disclosure comprises an erythroid cell, wherein the erythroid cell presents, e.g. comprises on the cell surface, at least one exogenous antigenic polypeptide, wherein the at least one exogenous antigenic polypeptide is a MAGE-A antigen. In a further embodiment, the MAGE-A antigen is selected from MAGE-A1, MAGE-A2, MAGE-A3, MAGE-A4, MAGE-A5, MAGE-A6, MAGE-A7, MAGE-A8, MAGE-A9, MAGE-A10, MAGE-A11 and MAGE-A12. In some embodiments, the erythroid cell is an enucleated cell. In some embodiments, the erythroid cell is a nucleated cell.

[0240] In some embodiments, an artificial antigen presenting cell (aAPC) of the present disclosure comprises an erythroid cell, wherein the erythroid cell presents, e.g. comprises on the cell surface, at least one exogenous antigenic polypeptide, wherein the at least one exogenous antigenic polypeptide is a MAGE-A1 antigen. In some embodiments, an artificial antigen presenting cell (aAPC) of the present disclosure comprises an erythroid cell, wherein the erythroid cell presents, e.g. comprises on the cell surface, at least one exogenous antigenic polypeptide, wherein the at least one exogenous antigenic polypeptide is a MAGE-A2 antigen. In some embodiments, an artificial antigen presenting cell (aAPC) of the present disclosure comprises an erythroid cell, wherein the erythroid cell presents, e.g. comprises on the cell surface, at least one exogenous antigenic polypeptide, wherein the at least one exogenous antigenic polypeptide is a MAGE-A3 antigen. In some embodiments, an artificial antigen presenting cell (aAPC) of the present disclosure comprises an erythroid cell, wherein the erythroid cell presents, e.g. comprises on the cell surface, at least one exogenous antigenic polypeptide, wherein the at least one exogenous antigenic polypeptide is a MAGE-A4 antigen. In some embodiments, an artificial antigen presenting cell (aAPC) of the present disclosure comprises an erythroid cell, wherein the erythroid cell presents, e.g. comprises on the cell surface, at least one exogenous antigenic polypeptide, wherein the at least one exogenous antigenic polypeptide is a MAGE-A5 antigen. In some embodiments, an artificial antigen presenting cell (aAPC) of the present disclosure comprises an erythroid cell, wherein the erythroid cell presents, e.g. comprises on the cell surface, at least one exogenous antigenic polypeptide, wherein the at least one exogenous antigenic polypeptide is a MAGE-A6 antigen. In some embodiments, an artificial antigen presenting cell (aAPC) of the present disclosure comprises an erythroid cell, wherein the erythroid cell presents, e.g. comprises on the cell surface, at least one exogenous antigenic polypeptide, wherein the at least one exogenous antigenic polypeptide is a MAGE-A7 antigen. In some embodiments, an artificial antigen presenting cell (aAPC) of the present disclosure comprises an erythroid cell, wherein the erythroid cell presents, e.g. comprises on the cell surface, at least one exogenous antigenic polypeptide, wherein the at least one exogenous antigenic polypeptide is a MAGE-A8 antigen. In some embodiments, an artificial antigen presenting cell (aAPC) of the present disclosure comprises an erythroid cell, wherein the erythroid cell presents, e.g. comprises on the cell surface, at least one exogenous antigenic polypeptide, wherein the at least one exogenous antigenic polypeptide is a MAGE-A9 antigen. In some embodiments, an artificial antigen presenting cell (aAPC) of the present disclosure comprises an erythroid cell, wherein the erythroid cell presents, e.g. comprises on the cell surface, at least one exogenous antigenic polypeptide, wherein the at least one exogenous antigenic polypeptide is a MAGE-A10 antigen. In some embodiments, an artificial antigen presenting cell (aAPC) of the present disclosure comprises an erythroid cell, wherein the erythroid cell presents, e.g. comprises on the cell surface, at least one exogenous antigenic polypeptide, wherein the at least one exogenous antigenic polypeptide is a MAGE-A11 antigen. In some embodiments, an artificial antigen presenting cell (aAPC) of the present disclosure comprises an erythroid cell, wherein the erythroid cell presents, e.g. comprises on the cell surface, at least one exogenous antigenic polypeptide, wherein the at least one exogenous antigenic polypeptide is a MAGE-A12 antigen.

[0241] In another aspect, the disclosure features an artificial antigen presenting cell (aAPC) engineered to activate T cells, wherein the aAPC comprises an erythroid cell, wherein the erythroid cell presents, e.g. comprises on the cell surface, an exogenous antigen-presenting polypeptide and an exogenous antigenic polypeptide, wherein the exogenous antigenic polypeptide is specifically bound to the exogenous antigen-presenting polypeptide, wherein the exogenous antigen-presenting polypeptide is an MHC class I polypeptide or single chain fusion or an MHC class II polypeptide or single chain fusion, wherein the exogenous antigenic polypeptide is a MAGE-A antigen. In some embodiments, the MAGE-A antigen is selected from MAGE-A1, MAGE-A2, MAGE-A3, MAGE-A4, MAGE-A5, MAGE-A6, MAGE-A7, MAGE-A8, MAGE-A9, MAGE-A10, MAGE-A11 and MAGE-A12. In some embodiments, the MAGE-A antigen is selected from MAGE-A1, MAGE-A2, MAGE-A3, MAGE-A4, MAGE-A6, MAGE-A10 and MAGE-A12.

[0242] In some embodiments, the disclosure features an artificial antigen presenting cell (aAPC) engineered to activate T cells, wherein the aAPC comprises an erythroid cell, wherein the erythroid cell presents, e.g. comprises on the cell surface, an exogenous antigen-presenting polypeptide and an exogenous antigenic polypeptide, wherein the exogenous antigenic polypeptide is specifically bound to the exogenous antigen-presenting polypeptide, wherein the exogenous antigen-presenting polypeptide is an MHC class I polypeptide or single chain fusion or an MHC class II polypeptide or single chain fusion, and wherein the exogenous antigenic polypeptide is a MAGE-A1 antigen. In some embodiments, the MAGE-A1 antigen is selected from the group consisting of EADPTGHSY (SEQ ID NO: 123), KVLEYVIKV (SEQ ID NO: 126), SLFRAVITK (SEQ ID NO: 127), EVYDGREHSA (SEQ ID NO: 129), RVRFFFPSL (SEQ ID NO: 130), EADPTGHSY (SEQ ID NO: 123), REPVTKAEML (SEQ ID NO: 131), KEADPTGHSY (SEQ ID NO: 132), DPARYEFLW (SEQ ID NO: 133), ITKKVADLVGF (SEQ ID NO: 134), SAFPTTINF (SEQ ID NO: 135), SAYGEPRKL (SEQ ID NO: 136), RVRFFFPSL (SEQ ID NO: 130), SAYGEPRKL (SEQ ID NO: 136), TSCILESLFRAVITK (SEQ ID NO: 137), PRALAETSYVKVLEY (SEQ ID NO: 138), FLLLKYRAREPVTKAE (SEQ ID NO: 139) and EYVIKVSARVRF (SEQ ID NO: 140).

[0243] In some embodiments, the disclosure features an artificial antigen presenting cell (aAPC) engineered to activate T cells, wherein the aAPC comprises an erythroid cell, wherein the erythroid cell presents, e.g. comprises on the cell surface, an exogenous antigen-presenting polypeptide and an exogenous antigenic polypeptide, wherein, the exogenous antigenic polypeptide is specifically bound to the exogenous antigen-presenting polypeptides, e.g. histocompatibility molecules (MHCI, MHCII), wherein the exogenous antigen-presenting polypeptide is an MHC class I polypeptide or single chain fusion or an MHC class II single chain fusion, and wherein the exogenous antigenic polypeptide is a MAGE-A2 antigen. In some embodiments, the MAGE-A2 antigen is selected from the group consisting of YLQLVFGIEV (SEQ ID NO: 141), EYLQLVFGI (SEQ ID NO: 145), REPVTKAEML (SEQ ID NO: 131), EGDCAPEEK (SEQ ID NO: 146) and LLKYRAREPVTKAE (SEQ ID NO: 147).

[0244] In some embodiments, the disclosure features an artificial antigen presenting cell (aAPC) engineered to activate T cells, wherein the aAPC comprises an erythroid cell, wherein the erythroid cell presents, e.g. comprises on the cell surface, an exogenous antigen-presenting polypeptide and an exogenous antigenic polypeptide, wherein the exogenous antigenic polypeptide is specifically bound to the exogenous antigen-presenting polypeptides, e.g. histocompatibility molecules (MHCI, MHCII), wherein the exogenous antigen-presenting polypeptide is an MHC class I polypeptide or single chain fusion or an MHC class II polypeptide or single chain fusion, and wherein the exogenous antigenic polypeptide is a MAGE-A3 antigen. In some embodiments, the MAGE-A3 antigen is selected from the group consisting of EVDPIGHLY (SEQ ID NO: 148), FLWGPRALVD (SEQ ID NO: 149), KVAELVHFL (SEQ ID NO: 150), TFPDLESEF (SEQ ID NO: 153), VAELVHFLL (SEQ ID NO: 154), MEVDPIGHLY (SEQ ID NO: 155), EVDPIGHLY (SEQ ID NO: 148), REPVTKAEML (SEQ ID NO: 131), AELVHFLLLI (SEQ ID NO: 157), EVDPIGHLY (SEQ ID NO: 148), WQYFFPVIF (SEQ ID NO: 158), EGDCAPEEK (SEQ ID NO: 146), KKLLTQHFVQENYLEY (SEQ ID NO: 159), RKVAELVHFLLLKYR (SEQ ID NO: 160), KKLLTQHFVQENYLEY (SEQ ID NO: 159), ACYEFLWGPRALVETS (SEQ ID NO: 161), RKVAELVHFLLLKYR (SEQ ID NO: 160), VIFSKASSSLQL (SEQ ID NO: 162), VIFSKASSSLQL (SEQ ID NO: 162), VFGIELMEVDPIGHL (SEQ ID NO: 163), GDNQIMPKAGLLIIV (SEQ ID NO: 164), TSYVKVLHHMVKISG (SEQ ID NO: 165), RKVAELVHFLLLKYRA (SEQ ID NO: 166) and FLLLKYRAREPVTKAE (SEQ ID NO: 139).

[0245] In some embodiments, the disclosure features an artificial antigen presenting cell (aAPC) engineered to activate T cells, wherein the aAPC comprises an erythroid cell, wherein the erythroid cell presents, e.g. comprises on the cell surface, an exogenous antigen-presenting polypeptide and an exogenous antigenic polypeptide, wherein the exogenous antigenic polypeptide is specifically bound to the exogenous antigen-presenting polypeptides, e.g. histocompatibility molecules (MHCI, MHCII), wherein the exogenous antigen-presenting polypeptide is an MHC class I polypeptide or single chain fusion or an MHC class II polypeptide or single chain fusion, and wherein the exogenous antigenic polypeptide is a MAGE-A4 antigen. In embodiments, the MAGE-A4 antigen is selected from the group consisting of EVDPASNTYJ (SEQ ID NO: 167) and GVYDGREHTV (SEQ ID NO: 168).

[0246] In some embodiments, the disclosure features an artificial antigen presenting cell (aAPC) engineered to activate T cells, wherein the aAPC comprises an erythroid cell, wherein the erythroid cell presents, e.g. comprises on the cell surface, an exogenous antigen-presenting polypeptide and an exogenous antigenic polypeptide, wherein the exogenous antigenic polypeptide is specifically bound to the exogenous antigen-presenting polypeptides, e.g. histocompatibility molecules (MHCI, MHCII), wherein the exogenous antigen-presenting polypeptide is an MHC class I polypeptide or single chain fusion or an MHC class II polypeptide or single chain fusion, and wherein the exogenous antigenic polypeptide is a MAGE-A5 antigen.

[0247] In some embodiments, the disclosure features an artificial antigen presenting cell (aAPC) engineered to activate T cells, wherein the aAPC comprises an erythroid cell, wherein the erythroid cell presents, e.g. comprises on the cell surface, an exogenous antigen-presenting polypeptide and an exogenous antigenic polypeptide, wherein the exogenous antigenic polypeptide is specifically bound to the exogenous antigen-presenting polypeptides, e.g. histocompatibility molecules (MHCI, MHCII), wherein the exogenous antigen-presenting polypeptide is an MHC class I polypeptide or single chain fusion or an MHC class II polypeptide or single chain fusion, and wherein the exogenous antigenic polypeptide is a MAGE-A6 antigen. In some embodiments, the MAGE-A6 antigen is selected from the group consisting of SESLKMIF (SEQ ID NO: 170), MVKISGGPR (SEQ ID NO: 171), EVDPIGHVY (SEQ ID NO: 172), REPVTKAEML (SEQ ID NO: 131), EGDCAPEEK (SEQ ID NO: 146), ISGGPRISY (SEQ ID NO: 173), LLKYRAREPVTKAE (SEQ ID NO: 147).

[0248] In some embodiments, the disclosure features an artificial antigen presenting cell (aAPC) engineered to activate T cells, wherein the aAPC comprises an erythroid cell, wherein the erythroid cell presents, e.g. comprises on the cell surface, an exogenous antigen-presenting polypeptide and an exogenous antigenic polypeptide, wherein the exogenous antigenic polypeptide is specifically bound to the exogenous antigen-presenting polypeptides, e.g. histocompatibility molecules (MHCI, MHCII), wherein the exogenous antigen-presenting polypeptide is an MHC class I polypeptide or single chain fusion or an MHC class II polypeptide or single chain fusion, wherein the exogenous antigenic polypeptide is a MAGE-A7 antigen.

[0249] In some embodiments, the disclosure features an artificial antigen presenting cell (aAPC) engineered to activate T cells, wherein the aAPC comprises an erythroid cell, wherein the erythroid cell presents, e.g. comprises on the cell surface, an exogenous antigen-presenting polypeptide and an exogenous antigenic polypeptide, wherein the exogenous antigenic polypeptide is specifically bound to the exogenous antigen-presenting polypeptides, e.g. histocompatibility molecules (MHCI, MHCII), wherein the exogenous antigen-presenting polypeptide is an MHC class I polypeptide or single chain fusion or an MHC class II polypeptide or single chain fusion, wherein the exogenous antigenic polypeptide is a MAGE-A8 antigen.

[0250] In some embodiments, the disclosure features an artificial antigen presenting cell (aAPC) engineered to activate T cells, wherein the aAPC comprises an erythroid cell, wherein the erythroid cell presents, e.g. comprises on the cell surface, an exogenous antigen-presenting polypeptide and an exogenous antigenic polypeptide, wherein the exogenous antigenic polypeptide is specifically bound to the exogenous antigen-presenting polypeptides, e.g. histocompatibility molecules (MHCI, MHCII), wherein the exogenous antigen-presenting polypeptide is an MHC class I polypeptide or single chain fusion or an MHC class II polypeptide or single chain fusion, wherein the exogenous antigenic polypeptide is a MAGE-A9 antigen (SEQ ID NO: 176). In some embodiments, the MAGE-A9 antigen is ALSVMGVYV.

[0251] In some embodiments, the disclosure features an artificial antigen presenting cell (aAPC) engineered to activate T cells, wherein the aAPC comprises an erythroid cell, wherein the erythroid cell presents, e.g. comprises on the cell surface, an exogenous antigen-presenting polypeptide and an exogenous antigenic polypeptide, wherein the exogenous antigenic polypeptide is specifically bound to the exogenous antigen-presenting polypeptides, e.g. histocompatibility molecules (MHCI, MHCII), wherein the exogenous antigen-presenting polypeptide is an MHC class I polypeptide or single chain fusion or an MHC class II polypeptide or single chain fusion, wherein the exogenous antigenic polypeptide is a MAGE-A10 antigen. In some embodiments, the MAGE-A10 antigen is selected from the group consisting of GLYDGMEHLI (SEQ ID NO: 715) and DPARYEFLW (SEQ ID NO: 133).

[0252] In some embodiments, the disclosure features an artificial antigen presenting cell (aAPC) engineered to activate T cells, wherein the aAPC comprises an erythroid cell, wherein the erythroid cell presents, e.g. comprises on the cell surface, an exogenous antigen-presenting polypeptide and an exogenous antigenic polypeptide, wherein the exogenous antigenic polypeptide is specifically bound to the exogenous antigen-presenting polypeptides, e.g. histocompatibility molecules (MHCI, MHCII), wherein the exogenous antigen-presenting polypeptide is an MHC class I polypeptide or single chain fusion or an MHC class II polypeptide or single chain fusion, wherein the exogenous antigenic polypeptide is a MAGE-A11 antigen.

[0253] In some embodiments, the disclosure features an artificial antigen presenting cell (aAPC) engineered to activate T cells, wherein the aAPC comprises an erythroid cell, wherein the erythroid cell presents, e.g. comprises on the cell surface, an exogenous antigen-presenting polypeptide and an exogenous antigenic polypeptide, wherein the exogenous antigenic polypeptide is specifically bound to the exogenous antigen-presenting polypeptides, e.g. histocompatibility molecules (MHCI, MHCII), wherein the exogenous antigen-presenting polypeptide is an MHC class I polypeptide or single chain fusion or an MHC class II polypeptide or single chain fusion, wherein the exogenous antigenic polypeptide is a MAGE-A12 antigen. In some embodiments, the MAGE-A12 antigen is selected from the group consisting of FLWGPRALVE (SEQ ID NO: 179), VRIGHLYIL (SEQ ID NO: 180), EGDCAPEEK (SEQ ID NO: 146), REPFTKAEMLGSVIR (SEQ ID NO: 181) and AELVHFLLLKYRAR (SEQ ID NO: 182).

[0254] Also encompassed by the disclosure is an artificial antigen presenting cell (aAPC) comprising an erythroid cell, wherein the erythroid cell presents, e.g. comprises on the cell surface, at least one exogenous antigenic polypeptide that comprises an epitope common to several tumor antigens of the MAGE-A family. In some embodiments, the exogenous antigenic polypeptide comprises the epitope p248v9 (YLEYRQVPV (SEQ ID NO: 124)), an immunogenic peptide presented by HLA-A*0201 and capable of inducing cytotoxic T lymphocytes (CTLs) which recognize all the MAGE-A antigens. In some embodiments, the exogenous antigenic polypeptide comprises the epitope p248g9 (YLEYRQVPG (SEQ ID NO: 156)), an immunogenic peptide which is capable of inducing CTLs which recognize MAGE-A2, A3, A4, A6, A10, A12. In some embodiments, the exogenous antigenic polypeptide comprises the epitope p248d9 (YLEYRQVPD (SEQ ID NO: 125)), an immunogenic peptide which is capable of inducing CTLs which recognize MAGE-A1.

[0255] In some embodiments, an artificial antigen presenting cell (aAPC) of the present disclosure comprises an erythroid cell, wherein the erythroid cell presents, e.g. comprises on the cell surface, at least one exogenous antigenic polypeptide, wherein the at least one exogenous antigenic polypeptide is p248v9 (YLEYRQVPV (SEQ ID NO: 124)). In some embodiments, an artificial antigen presenting cell (aAPC) of the present disclosure comprises an erythroid cell, wherein the erythroid cell presents, e.g. comprises on the cell surface, at least one exogenous antigenic polypeptide, wherein the at least one exogenous antigenic polypeptide is p248g9 (YLEYRQVPG (SEQ ID NO: 156)). In some embodiments, an artificial antigen presenting cell (aAPC) of the present disclosure comprises an erythroid cell, wherein the erythroid cell presents, e.g. comprises on the cell surface, at least one exogenous antigenic polypeptide, wherein the at least one exogenous antigenic polypeptide is p248d9 (YLEYRQVPD (SEQ ID NO: 125)).

[0256] Also encompassed by the disclosure is an artificial antigen presenting cell (aAPC) engineered to activate T cells, wherein the aAPC comprises an erythroid cell, wherein the erythroid cell presents, e.g. comprises on the cell surface, an exogenous antigen-presenting polypeptide and an exogenous antigenic polypeptide, wherein the exogenous antigenic polypeptide is specifically bound to the exogenous antigen-presenting polypeptides, e.g. histocompatibility molecules (MHCI, MHCII), wherein the exogenous antigen-presenting polypeptide is an MHC class I polypeptide or single chain fusion or an MHC class II polypeptide or single chain fusion, and wherein the exogenous antigenic polypeptide is p248v9 (YLEYRQVPV (SEQ ID NO: 124)). In some embodiments, the disclosure features an artificial antigen presenting cell (aAPC) engineered to activate T cells, wherein the aAPC comprises an erythroid cell, wherein the erythroid cell presents, e.g. comprises on the cell surface, an exogenous antigen-presenting polypeptide and an exogenous antigenic polypeptide, wherein the exogenous antigenic polypeptide is specifically bound to the exogenous antigen-presenting polypeptides, e.g. histocompatibility molecules (MHCI, MHCII), wherein the exogenous antigen-presenting polypeptide is an MHC class I polypeptide or single chain fusion or an MHC class II polypeptide or single chain fusion, and wherein the exogenous antigenic polypeptide is p248g9 (YLEYRQVPG (SEQ ID NO: 156)). In some embodiments, the disclosure features an artificial antigen presenting cell (aAPC) engineered to activate T cells, wherein the aAPC comprises an erythroid cell, wherein the erythroid cell presents, e.g. comprises on the cell surface, an exogenous antigen-presenting polypeptide and an exogenous antigenic polypeptide, wherein the exogenous antigenic polypeptide is specifically bound to the exogenous antigen-presenting polypeptides, e.g. histocompatibility molecules (MHCI, MHCII), wherein the exogenous antigen-presenting polypeptide is an MHC class I polypeptide or single chain fusion or an MHC class II polypeptide or single chain fusion, and wherein the exogenous antigenic polypeptide is p248d9 (YLEYRQVPD (SEQ ID NO: 125)). In embodiments, the exogenous antigen-presenting polypeptide is MHC I HLA-A, e.g, MHC I HLA-A *201.

[0257] In one particular embodiment, an artificial antigen presenting cell comprises an erythroid cell, wherein the erythroid cell presents, e.g. comprises on the cell surface, at least one exogenous antigenic polypeptide, p248v9 (YLEYRQVPV (SEQ ID NO: 124)), fused to an exogenous antigen presenting polypeptide, MHCI HLA-A *201, fused to the GPA transmembrane domain (GPA). In one particular embodiment, an artificial antigen presenting cell comprises an erythroid cell, wherein the erythroid cell presents, e.g. comprises on the cell surface, at least one exogenous antigenic polypeptide, p248g9 (YLEYRQVPG (SEQ ID NO: 156)), fused to an exogenous antigen presenting polypeptide, MHCI HLA-A *201, fused to the GPA transmembrane domain (GPA). In one particular embodiment, an artificial antigen presenting cell comprises an erythroid cell, wherein the erythroid cell presents, e.g. comprises on the cell surface, at least one exogenous antigenic polypeptide, p248d9 (YLEYRQVPD (SEQ ID NO: 125)), fused to an exogenous antigen presenting polypeptide, MHCI HLA-A *201, fused to the GPA transmembrane domain (GPA).

[0258] In some embodiments, an artificial antigen presenting cell (aAPC) of the present disclosure comprises an erythroid cell, wherein the erythroid cell presents, e.g. comprises on the cell surface, at least one exogenous antigenic polypeptide, wherein the at least one exogenous antigenic polypeptide is a MAGE-A antigen as listed in Table 1. In some embodiments, an artificial antigen presenting cell (aAPC) of the present disclosure comprises an erythroid cell, wherein the erythroid cell presents, e.g. comprises on the cell surface, at least one exogenous antigenic polypeptide, wherein the at least one exogenous antigenic polypeptide is a MAGE-A antigen as listed in Table 1, and further presents, e.g. comprises on the cell surface, an exogenous polypeptide comprising 4-1BBL. In some embodiments, an artificial antigen presenting cell (aAPC) of the present disclosure comprises an erythroid cell, wherein the erythroid cell presents, e.g. comprises on the cell surface, at least one exogenous antigenic polypeptide, wherein the at least one exogenous antigenic polypeptide is a MAGE-A antigen selected from the MAGE-A antigens listed in Table 1, and further presents, e.g. comprises on the cell surface, an exogenous antigen-presenting polypeptide, wherein the exogenous antigenic polypeptide is specifically bound to the exogenous antigen-presenting polypeptide, wherein the exogenous antigen-presenting polypeptide is the corresponding MHC Class I or MHC Class II HLA listed in Table 1 for the particular MAGE-A antigen. In some embodiments, an artificial antigen presenting cell (aAPC) of the present disclosure comprises an erythroid cell, wherein the erythroid cell presents, e.g. comprises on the cell surface, at least one exogenous antigenic polypeptide, wherein the at least one exogenous antigenic polypeptide is a MAGE-A antigen selected from the MAGE-A antigens listed in Table 1, and further presents, e.g. comprises on the cell surface, an exogenous antigen-presenting polypeptide, wherein the exogenous antigenic polypeptide is specifically bound to the exogenous antigen-presenting polypeptide, wherein the exogenous antigen-presenting polypeptide is the corresponding MHC Class I or MHC Class II HLA listed in Table 1 for the particular MAGE-A antigen, and an exogenous polypeptide comprising 4-1BBL. In another embodiment, an artificial antigen presenting cell (aAPC) of the present disclosure comprises an erythroid cell, wherein the erythroid cell presents, e.g. comprises on the cell surface, at least one exogenous antigenic polypeptide, wherein the at least one exogenous antigenic polypeptide is a MAGE-A antigen selected from the MAGE-A antigens listed in Table 1, and further presents, e.g. comprises on the cell surface, an exogenous antigen-presenting polypeptide, wherein the exogenous antigenic polypeptide is specifically bound to the exogenous antigen-presenting polypeptide, wherein the exogenous antigen-presenting polypeptide is the corresponding MHC Class I HLA listed in Table 1 for the particular MAGE-A antigen, and an exogenous polypeptide comprising 4-1BBL.

[0259] In some embodiments, an artificial antigen presenting cell (aAPC) of the present disclosure comprises an erythroid cell, wherein the erythroid cell presents, e.g. comprises on the cell surface, at least one exogenous antigenic polypeptide, wherein the at least one exogenous antigenic polypeptide comprises or consist of a MAGE-A antigen selected from EADPTGHSY (SEQ ID NO: 123), KVLEYVIKV (SEQ ID NO: 126), SLFRAVITK (SEQ ID NO: 127), EVYDGREHSA (SEQ ID NO: 129), RVRFFFPSL (SEQ ID NO: 130), EADPTGHSY (SEQ ID NO: 123), REPVTKAEML (SEQ ID NO: 131), KEADPTGHSY (SEQ ID NO: 132), DPARYEFLW (SEQ ID NO: 133), ITKKVADLVGF (SEQ ID NO: 134), SAFPTTINF (SEQ ID NO: 135), SAYGEPRKL (SEQ ID NO: 136), RVRFFFPSL (SEQ ID NO: 130), SAYGEPRKL (SEQ ID NO: 136), TSCILESLFRAVITK (SEQ ID NO: 137), PRALAETSYVKVLEY (SEQ ID NO: 138), FLLLKYRAREPVTKAE (SEQ ID NO: 139), EYVIKVSARVRF (SEQ ID NO: 140), YLQLVFGIEV (SEQ ID NO: 141), EYLQLVFGI (SEQ ID NO: 145), REPVTKAEML (SEQ ID NO: 131), EGDCAPEEK (SEQ ID NO: 146), LLKYRAREPVTKAE (SEQ ID NO: 147), EVDPIGHLY (SEQ ID NO: 148), FLWGPRALVD (SEQ ID NO: 149), KVAELVHFL (SEQ ID NO: 150), TFPDLESEF (SEQ ID NO: 153), VAELVHFLL MEVDPIGHLY (SEQ ID NO: 716), EVDPIGHLY (SEQ ID NO: 148), REPVTKAEML (SEQ ID NO: 131), AELVHFLLLI (SEQ ID NO: 157), MEVDPIGHLY (SEQ ID NO: 155), WQYFFPVIF (SEQ ID NO: 158), EGDCAPEEK (SEQ ID NO: 146), KKLLTQHFVQENYLEY (SEQ ID NO: 159), RKVAELVHFLLLKYR (SEQ ID NO: 160), KKLLTQHFVQENYLEY (SEQ ID NO: 159), ACYEFLWGPRALVETS (SEQ ID NO: 161), RKVAELVHFLLLKYR (SEQ ID NO: 160), VIFSKASSSLQL (SEQ ID NO: 162), VIFSKASSSLQL (SEQ ID NO: 162), VFGIELMEVDPIGHL (SEQ ID NO: 163), GDNQIMPKAGLLIIV (SEQ ID NO: 164), TSYVKVLHHMVKISG (SEQ ID NO: 165), RKVAELVHFLLLKYRA (SEQ ID NO: 166), FLLLKYRAREPVTKAE (SEQ ID NO: 139), EVDPASNTYj (SEQ ID NO: 167), GVYDGREHTV (SEQ ID NO: 168), NYKRCFPVI (SEQ ID NO: 169), SESLKMIF (SEQ ID NO: 170), MVKISGGPR (SEQ ID NO: 171), EVDPIGHVY (SEQ ID NO: 172), REPVTKAEML (SEQ ID NO: 131), EGDCAPEEK (SEQ ID NO: 146), ISGGPRISY (SEQ ID NO: 173), LLKYRAREPVTKAE (SEQ ID NO: 147), ALSVMGVYV (SEQ ID NO: 176), GLYDGMEHLI (SEQ ID NO: 715), DPARYEFLW (SEQ ID NO: 133), FLWGPRALVE (SEQ ID NO: 179), VRIGHLYIL (SEQ ID NO: 180), EGDCAPEEK (SEQ ID NO: 146), REPFTKAEMLGSVIR (SEQ ID NO: 181) and AELVHFLLLKYRAR (SEQ ID NO: 182).

[0260] In some embodiments, an artificial antigen presenting cell (aAPC) of the present disclosure comprises an erythroid cell, wherein the erythroid cell presents, e.g. comprises on the cell surface, at least one exogenous antigenic polypeptide, wherein the at least one exogenous antigenic polypeptide comprises or consists of a MAGE-A antigen selected from EADPTGHSY (SEQ ID NO: 123), KVLEYVIKV (SEQ ID NO: 126), SLFRAVITK (SEQ ID NO: 127), EVYDGREHSA (SEQ ID NO: 129), RVRFFFPSL (SEQ ID NO: 130), EADPTGHSY (SEQ ID NO: 123), REPVTKAEML (SEQ ID NO: 131), KEADPTGHSY (SEQ ID NO: 132), DPARYEFLW (SEQ ID NO: 133), ITKKVADLVGF (SEQ ID NO: 134), SAFPTTINF (SEQ ID NO: 135), SAYGEPRKL (SEQ ID NO: 136), RVRFFFPSL (SEQ ID NO: 130), SAYGEPRKL (SEQ ID NO: 136), TSCILESLFRAVITK (SEQ ID NO: 137), PRALAETSYVKVLEY (SEQ ID NO: 138), FLLLKYRAREPVTKAE (SEQ ID NO: 139), EYVIKVSARVRF (SEQ ID NO: 140), YLQLVFGIEV (SEQ ID NO: 141), EYLQLVFGI (SEQ ID NO: 145), REPVTKAEML (SEQ ID NO: 131), EGDCAPEEK (SEQ ID NO: 146), LLKYRAREPVTKAE (SEQ ID NO: 147), EVDPIGHLY (SEQ ID NO: 148), FLWGPRALVD (SEQ ID NO: 149), KVAELVHFL (SEQ ID NO: 150), TFPDLESEF (SEQ ID NO: 153), VAELVHFLL MEVDPIGHLY (SEQ ID NO: 716), EVDPIGHLY (SEQ ID NO: 148), REPVTKAEML (SEQ ID NO: 131), AELVHFLLLI (SEQ ID NO: 157), MEVDPIGHLY (SEQ ID NO: 155), WQYFFPVIF (SEQ ID NO: 158), EGDCAPEEK (SEQ ID NO: 146), KKLLTQHFVQENYLEY (SEQ ID NO: 159), RKVAELVHFLLLKYR (SEQ ID NO: 160), KKLLTQHFVQENYLEY (SEQ ID NO: 159), ACYEFLWGPRALVETS (SEQ ID NO: 161), RKVAELVHFLLLKYR (SEQ ID NO: 160), VIFSKASSSLQL (SEQ ID NO: 162), VIFSKASSSLQL (SEQ ID NO: 162), VFGIELMEVDPIGHL (SEQ ID NO: 163), GDNQIMPKAGLLIIV (SEQ ID NO: 164), TSYVKVLHHMVKISG (SEQ ID NO: 165), RKVAELVHFLLLKYRA (SEQ ID NO: 166), FLLLKYRAREPVTKAE (SEQ ID NO: 139), EVDPASNTYj (SEQ ID NO: 167), GVYDGREHTV (SEQ ID NO: 168), NYKRCFPVI (SEQ ID NO: 169), SESLKMIF (SEQ ID NO: 170), MVKISGGPR (SEQ ID NO: 171), EVDPIGHVY (SEQ ID NO: 172), REPVTKAEML (SEQ ID NO: 131), EGDCAPEEK (SEQ ID NO: 146), ISGGPRISY (SEQ ID NO: 173), LLKYRAREPVTKAE (SEQ ID NO: 147), ALSVMGVYV (SEQ ID NO: 176), GLYDGMEHLI (SEQ ID NO: 715), DPARYEFLW (SEQ ID NO: 133), FLWGPRALVE (SEQ ID NO: 179), VRIGHLYIL (SEQ ID NO: 180), EGDCAPEEK (SEQ ID NO: 146), REPFTKAEMLGSVIR (SEQ ID NO: 181) and AELVHFLLLKYRAR (SEQ ID NO: 182), and wherein the erythroid cell further comprises an exogenous polypeptide comprising 4-1BBL.

[0261] In a further embodiment, an aAPC as described herein, comprising any of the exogenous antigenic polypeptides comprising a MAGE-A antigen (e.g. a MAGE-A1, MAGE-A2, MAGE-A3, MAGE-A4, MAGE-A5, MAGE-A6, MAGE-A7, MAGE-A8, MAGE-A9, MAGE-A10, MAGE-A11 or MAGE-A12 antigen, as set forth above), can be engineered to further comprise an exogenous polypeptide comprising 4-1BBL. In another further embodiment, an aAPC as described herein, comprising at least one exogenous antigenic polypeptide that comprises an epitope common to one or more MAGE-A antigens (e.g. p248v9, p248g9 and/or p248d9) as described herein, can be engineered to further comprise an exogenous polypeptide comprising 4-1BBL.

[0262] An aAPC as described herein, comprising any of the exogenous antigenic polypeptides comprising a MAGE-A antigen (e.g. a MAGE-A1, MAGE-A2, MAGE-A3, MAGE-A4, MAGE-A5, MAGE-A6, MAGE-A7, MAGE-A8, MAGE-A9, MAGE-A10, MAGE-A11 or MAGE-A12 antigen, as set forth above) can be used in the treatment of cancer, as described in more detail below. An aAPC as described herein, comprising any of the exogenous antigenic polypeptides comprising a MAGE-A antigen (e.g. a MAGE-A1, MAGE-A2, MAGE-A3, MAGE-A4, MAGE-A5, MAGE-A6, MAGE-A7, MAGE-A8, MAGE-A9, MAGE-A10, MAGE-A11 or MAGE-A12 antigen, as set forth above), and further comprising an exogenous polypeptide comprising 4-1BBL, can be used in the treatment of cancer, as described in more detail below. Further, an aAPC as described herein, comprising an exogenous antigenic polypeptide that comprises an epitope common to one or more MAGE-A antigens (e.g. p248v9, p248g9 and/or p248d9) can be used in the treatment of cancer, as described in more detail below. Further, an aAPC as described herein, comprising an exogenous antigenic polypeptide that comprises an epitope common to one or more MAGE-A antigens (e.g. p248v9, p248g9 and/or p248d9), and further comprising an exogenous polypeptide comprising 4-1BBL, can be used in the treatment of cancer, as described in more detail below.

### Neutrophil Granule Protease

[0263] Neutrophil elastase, proteinase 3, and cathepsin G are three homologous proteases that belong to the chymotrypsin superfamily of serine proteases. They act in combination with reactive oxygen species to help degrade engulfed microorganisms inside phagolysosomes. These proteases are also externalized in an active form during neutrophil activation at inflammatory sites, thus contributing to the regulation of inflammatory and immune responses. In addition to their involvement in pathogen destruction and the regulation of proinflammatory processes, neutrophil serine proteases (NSPs) are also involved in a variety of inflammatory human conditions, including chronic lung diseases (chronic obstructive pulmonary disease, cystic fibrosis, acute lung injury, and acute respiratory distress syndrome) and cancer. For example, proteinase 3 is highly expressed in acute myelogenous leukemia and in prostate cancer cells (Kolnin et al., Blood 2016 128:1025). Proteinasae 3 and neutrophil elastase have been shown to be aberrantly expressed in breast cancer cells (Desmedt et al. Int J Cancer, 2006 Dec. 1:119).

[0264] Neutrophil elastase is an enzyme that in humans is encoded by the ELANE gene. Neutrophil elastase is secreted by neutrophils and macrophages during inflammation, and it destroys bacteria and host tissue. Proteinase 3 is an enzyme that in humans is encoded by the PRTN3 gene. In human neutrophils, proteinase 3 contributes to the proteolytic generation of antimicrobial peptides. It is also the target of anti-neutrophil cytoplasmic antibodies (ANCAs) of the c-ANCA (cytoplasmic subtype) class, a type of antibody frequently found in the disease granulomatosis with polyangiitis. Cathepsin G is a protein that in humans is encoded by the CTSG gene. The encoded protease has a specificity similar to that of chymotrypsin C, and may participate in the killing and digestion of engulfed pathogens, and in connective tissue remodeling at sites of inflammation. In addition, the encoded protein is antimicrobial, with bacteriocidal activity against S. aureus and N. gonorrhoeae.

[0265] In some embodiments, an artificial antigen presenting cell (aAPC) of the present disclosure comprises an erythroid cell, wherein the erythroid cell presents, e.g. comprises on the cell surface, at least one exogenous antigenic polypeptide, wherein the at least one exogenous antigenic polypeptide is a neutrophil granule protease antigen. In a further embodiment, the neutrophil granule protease is selected from neutrophil elastase, proteinase 3 and cathepsin G. In some embodiments, the erythroid cell is an enucleated cell. In some embodiments, the erythroid cell is a nucleated cell.

[0266] In some embodiments, an artificial antigen presenting cell (aAPC) of the present disclosure comprises an erythroid cell, wherein the erythroid cell presents, e.g. comprises on the cell surface, at least one exogenous antigenic polypeptide, wherein the at least one exogenous antigenic polypeptide is a neutrophil elastase antigen. In some embodiments, an artificial antigen presenting cell (aAPC) of the present disclosure comprises an erythroid cell, wherein the erythroid cell presents, e.g. comprises on the cell surface, at least one exogenous antigenic polypeptide, wherein the at least one exogenous antigenic polypeptide is a proteinase 3 antigen. In some embodiments, an artificial antigen presenting cell (aAPC) of the present disclosure comprises an erythroid cell, wherein the erythroid cell presents, e.g. comprises on the cell surface, at least one exogenous antigenic polypeptide, wherein the at least one exogenous antigenic polypeptide is a cathepsin G antigen. I

[0267] In some embodiments, an artificial antigen presenting cell (aAPC) of the present disclosure comprises an erythroid cell, wherein the erythroid cell presents, e.g. comprises on the cell surface, at least one exogenous antigenic polypeptide, wherein the at least one exogenous antigenic polypeptide is a neutrophil elastase antigen, and wherein the erythroid cell further presents, e.g. comprises on the cell surface, at least one exogenous polypeptide comprising 4-1BBL. In some embodiments, an artificial antigen presenting cell (aAPC) of the present disclosure comprises an erythroid cell, wherein the erythroid cell presents, e.g. comprises on the cell surface, at least one exogenous antigenic polypeptide, wherein the at least one exogenous antigenic polypeptide is a proteinase 3 antigen, and wherein the erythroid cell further presents, e.g. comprises on the cell surface, at least one exogenous polypeptide comprising 4-1BBL. In some embodiments, an artificial antigen presenting cell (aAPC) of the present disclosure comprises an erythroid cell, wherein the erythroid cell presents, e.g. comprises on the cell surface, at least one exogenous antigenic polypeptide, wherein the at least one exogenous antigenic polypeptide is a cathepsin G antigen, and wherein the erythroid cell further presents, e.g. comprises on the cell surface, at least one exogenous polypeptide comprising 4-1BBL.

[0268] In another aspect, the disclosure features an artificial antigen presenting cell (aAPC) engineered to activate T cells, wherein the aAPC comprises an erythroid cell, wherein the erythroid cell presents, e.g. comprises on the cell surface, an exogenous antigen-presenting polypeptide and an exogenous antigenic polypeptide, wherein the exogenous antigen-presenting polypeptide is an MHC class I polypeptide or single chain fusion or an MHC class II polypeptide or single chain fusion, wherein the exogenous antigenic polypeptide is a neutrophil granule protease antigen. In a further embodiment, the neutrophil granule protease is selected from neutrophil elastase, proteinase 3 and cathepsin G.

[0269] In another aspect, the disclosure features an artificial antigen presenting cell (aAPC) engineered to activate T cells, wherein the aAPC comprises an erythroid cell, wherein the erythroid cell presents, e.g. comprises on the cell surface, an exogenous antigen-presenting polypeptide and an exogenous antigenic polypeptide, wherein the exogenous antigenic polypeptide is specifically bound to the exogenous antigen-presenting polypeptide, wherein the exogenous antigen-presenting polypeptide is an MHC class I polypeptide or single chain fusion or an MHC class II polypeptide or single chain fusion, wherein the exogenous antigenic polypeptide is a neutrophil granule protease antigen, and wherein the erythroid cell further presents, e.g. comprises on the cell surface, at least one exogenous polypeptide comprising 4-1BBL. In a further embodiment, the neutrophil granule protease is selected from neutrophil elastase, proteinase 3 and cathepsin G.

[0270] In another aspect, the disclosure features an artificial antigen presenting cell (aAPC) engineered to activate T cells, wherein the aAPC comprises an erythroid cell, wherein the erythroid cell presents, e.g. comprises on the cell surface, an exogenous antigen-presenting polypeptide and an exogenous antigenic polypeptide, wherein the exogenous antigenic polypeptide is specifically bound to the exogenous antigen-presenting polypeptide, wherein the exogenous antigen-presenting polypeptide is an MHC class I polypeptide or single chain fusion, wherein the exogenous antigenic polypeptide is a neutrophil granule protease antigen, and wherein the erythroid cell further presents, e.g. comprises on the cell surface, at least one exogenous polypeptide comprising 4-1BBL. In a further embodiment, the neutrophil granule protease is selected from neutrophil elastase, proteinase 3 and cathepsin G.

[0271] In some embodiments, the disclosure features an artificial antigen presenting cell (aAPC) engineered to activate T cells, wherein the aAPC comprises an erythroid cell, wherein the erythroid cell presents, e.g. comprises on the cell surface, an exogenous antigen-presenting polypeptide and an exogenous antigenic polypeptide, wherein the exogenous antigenic polypeptide is specifically bound to the exogenous antigen-presenting polypeptide, wherein the exogenous antigen-presenting polypeptide is an MHC class I polypeptide or single chain fusion or an MHC class II polypeptide or single chain fusion, and wherein the exogenous antigenic polypeptide is a neutrophil elastase antigen. In some embodiments, the disclosure features an artificial antigen presenting cell (aAPC) engineered to activate T cells, wherein the aAPC comprises an erythroid cell, wherein the erythroid cell presents, e.g. comprises on the cell surface, an exogenous antigen-presenting polypeptide and an exogenous antigenic polypeptide, wherein the exogenous antigenic polypeptide is specifically bound to the exogenous antigen-presenting polypeptide, wherein the exogenous antigen-presenting polypeptide is an MHC class I polypeptide or single chain fusion or an MHC class II polypeptide or single chain fusion, and wherein the exogenous antigenic polypeptide is a proteinase 3 antigen. In some embodiments, the disclosure features an artificial antigen presenting cell (aAPC) engineered to activate T cells, wherein the aAPC comprises an erythroid cell, wherein the erythroid cell presents, e.g. comprises on the cell surface, an exogenous antigen-presenting polypeptide and an exogenous antigenic polypeptide, wherein the exogenous antigenic polypeptide is specifically bound to the exogenous antigen-presenting polypeptide, wherein the exogenous antigen-presenting polypeptide is an MHC class I polypeptide or single chain fusion or an MHC class II polypeptide or single chain fusion, and wherein the exogenous antigenic polypeptide is a cathepsin G antigen.

[0272] PR1 (VLQELNVTV (SEQ ID NO: 225)) is an HLA-A2-restricted peptide derived from the myeloid proteins proteinase 3 and neutrophil elastase. PR1 is recognized on myeloid leukemia cells by cytotoxic T lymphocytes (CTLs) that preferentially kill leukemia and contribute to cytogenetic remission.

[0273] Accordingly, also encompassed by the disclosure is an artificial antigen presenting cell (aAPC) comprising an erythroid cell, wherein the erythroid cell presents, e.g. comprises on the cell surface, at least one exogenous antigenic polypeptide, wherein the exogenous antigenic polypeptide is PR1.

[0274] Also encompassed by the disclosure is an artificial antigen presenting cell (aAPC) engineered to activate T cells, wherein the aAPC comprises an erythroid cell, wherein the erythroid cell presents, e.g. comprises on the cell surface, at least one exogenous antigenic polypeptide, wherein the at least one exogenous antigenic polypeptide is PR1.

[0275] Also encompassed by the disclosure is an artificial antigen presenting cell (aAPC) engineered to activate T cells, wherein the aAPC comprises an erythroid cell, wherein the erythroid cell presents, e.g. comprises on the cell surface, at least one exogenous antigenic polypeptide, wherein the at least one exogenous antigenic polypeptide is PR1, and wherein the erythroid cell further presents, e.g. comprises on the cell surface, at least one exogenous polypeptide comprising 4-1BBL.

[0276] Also encompassed by the disclosure is an artificial antigen presenting cell (aAPC) engineered to activate T cells, wherein the aAPC comprises an erythroid cell, wherein the erythroid cell presents, e.g. comprises on the cell surface, an exogenous antigen-presenting polypeptide and an exogenous antigenic polypeptide, wherein the exogenous antigenic polypeptide is specifically bound to the exogenous antigen-presenting polypeptide, wherein the exogenous antigen-presenting polypeptide is an MHC class I polypeptide or single chain fusion or an MHC class II polypeptide or single chain fusion, and wherein the exogenous antigenic polypeptide is PR1. In embodiments, the exogenous antigen-presenting polypeptide is an MHC Class I HLA-A2 polypeptide or single chain fusion.

[0277] Also encompassed by the disclosure is an artificial antigen presenting cell (aAPC) engineered to activate T cells, wherein the aAPC comprises an erythroid cell, wherein the erythroid cell presents, e.g. comprises on the cell surface, an exogenous antigen-presenting polypeptide and an exogenous antigenic polypeptide, wherein the exogenous antigenic polypeptide is specifically bound to the exogenous antigen-presenting polypeptide, wherein the exogenous antigen-presenting polypeptide is an MHC class I polypeptide or single chain fusion or an MHC class II polypeptide or single chain fusion, and wherein the exogenous antigenic polypeptide is PR1, and wherein the erythroid cell further presents, e.g. comprises on the cell surface, at least one exogenous polypeptide comprising 4-1BBL. In embodiments, the exogenous antigen-presenting polypeptide is an MHC Class I HLA-A2 polypeptide or single chain fusion.

[0278] In one particular embodiment, an artificial antigen presenting cell comprises an erythroid cell, wherein the erythroid cell presents, e.g. comprises on the cell surface, at least one exogenous antigenic polypeptide, PR1, fused to an exogenous antigen presenting polypeptide, MHCI HLA-A2, fused to the GPA transmembrane domain (GPA).

[0279] In one particular embodiment, an artificial antigen presenting cell comprises an erythroid cell, wherein the erythroid cell presents, e.g. comprises on the cell surface, at least one exogenous antigenic polypeptide, PR1, fused to an exogenous antigen presenting polypeptide, MHCI HLA-A2, fused to the GPA transmembrane domain (GPA), and wherein the erythroid cell further presents, e.g. comprises on the cell surface, at least one exogenous polypeptide comprising 4-1BBL.

[0280] An aAPC as described herein, comprising any of the exogenous antigenic polypeptides comprising a neutrophil granule protease antigen (e.g. neutrophil elastase antigen, proteinase 3 antigen, or cathepsin G antigen) can be used in the treatment of cancer, as described in more detail below. An aAPC as described herein, comprising any of the exogenous antigenic polypeptides comprising a neutrophil granule protease antigen (e.g. neutrophil elastase antigen, proteinase 3 antigen, or cathepsin G antigen), and further comprising an exogenous polypeptide comprising 4-1BBL, can be used in the treatment of cancer, as described in more detail below. An aAPC as described herein, comprising an exogenous antigenic polypeptide comprising PR1 can be used in the treatment of cancer, as described in more detail below. An aAPC as described herein, comprising an exogenous antigenic polypeptide comprising PR1, and further comprising an exogenous polypeptide comprising 4-1BBL, can be used in the treatment of cancer, as described in more detail below.

[0281] NY-ESO-1/LAGE-2

[0282] Cancer/testis (C/T) antigens are a category of tumor antigens with normal expression restricted to male germ cells in the testis but not in adult somatic tissues. In some cases, CT antigens are also expressed in ovary and in trophoblast. In malignancy, this gene regulation is disrupted, resulting in CT antigen expression in a proportion of tumors of various types. Cancer/testis antigen 1 (also known as Autoimmunogenic Cancer/Testis Antigen NY-ESO-1 or LAGE-2) is a protein that in humans is encoded by the CTAG1B gene. Cancer-testis antigen NY-ESO-1, initially cloned by the SEREX (serological analysis of recombinant tumor cDNA expression libraries) approach from an esophageal cancer, elicits humoral and cellular immune responses in a high proportion of patients with NY-ESO-1-expressing cancers (Stockert et al., J. Exp. Med. 1998; 187:1349-1354; Jager et al. J. Exp. Med. 1998; 187:265-270).

[0283] In one aspect, an artificial antigen presenting cell (aAPC) of the present disclosure comprises an erythroid cell, wherein the erythroid cell presents, e.g. comprises on the cell surface, at least one exogenous antigenic polypeptide, wherein the at least one exogenous antigenic polypeptide is a NY-ESO-1/LAGE-2 antigen. In some embodiments, the erythroid cell is an enucleated erythroid cell. In some embodiments, the erythroid cell is a nucleated cell.

[0284] In one aspect, an artificial antigen presenting cell (aAPC) of the present disclosure comprises an erythroid cell, wherein the erythroid cell presents, e.g. comprises on the cell surface, at least one exogenous antigenic polypeptide, wherein the at least one exogenous antigenic polypeptide is a NY-ESO-1/LAGE-2 antigen, and wherein the erythroid cell further presents, e.g. comprises on the cell surface, at least one exogenous polypeptide comprising 4-1BBL. In some embodiments, the engineered erythroid cell is an enucleated cell.

[0285] In another aspect, the disclosure features an artificial antigen presenting cell (aAPC) engineered to activate T cells, wherein the aAPC comprises an erythroid cell, wherein the erythroid cell presents, e.g. comprises on the cell surface, an exogenous antigen-presenting polypeptide and an exogenous antigenic polypeptide, wherein the exogenous antigenic polypeptide is specifically bound to the exogenous antigen-presenting polypeptide, wherein the exogenous antigen-presenting polypeptide is an MHC class I polypeptide or single chain fusion or an MHC class II polypeptide or single chain fusion, wherein the exogenous antigenic polypeptide is a NY-ESO-1/LAGE-2 antigen. In embodiments, the exogenous antigen-presenting polypeptide is an MHC Class I HLA-A2 or HLA-A24 polypeptide or single chain fusion. In embodiments, the exogenous antigen-presenting polypeptide is an MHC Class II DP4 polypeptide or single chain fusion. In some embodiments, the erythroid cell is an enucleated cell. In some embodiments, the erythroid cell is a nucleated cell.

[0286] In another aspect, the disclosure features an artificial antigen presenting cell (aAPC) engineered to activate T cells, wherein the aAPC comprises an erythroid cell, wherein the erythroid cell presents, e.g. comprises on the cell surface, an exogenous antigen-presenting polypeptide and an exogenous antigenic polypeptide, wherein the exogenous antigenic polypeptide is specifically bound to the exogenous antigen-presenting polypeptide, wherein the exogenous antigen-presenting polypeptide is an MHC class I polypeptide or single chain fusion or an MHC class II polypeptide or single chain fusion, wherein the exogenous antigenic polypeptide is a NY-ESO-1/LAGE-2 antigen, and wherein the erythroid cell further presents, e.g. comprises on the cell surface, at least one exogenous polypeptide comprising 4-1BBL. In embodiments, the exogenous antigen-presenting polypeptide is an MHC Class I HLA-A2 or HLA-A24 polypeptide or single chain fusion. In embodiments, the exogenous antigen-presenting polypeptide is an MHC Class II DP4 polypeptide or single chain fusion. In some embodiments, the erythroid cell is an enucleated cell. In some embodiments, the erythroid cell is a nucleated cell.

[0287] In some embodiments, an aAPC of the present disclosure comprises an erythroid cell, wherein the erythroid cell presents at least one exogenous antigenic polypeptide, wherein the at least one exogenous antigenic polypeptide is a NY-ESO-1/LAGE-2 antigen as listed in Table 1. In some embodiments, an aAPC of the present disclosure comprises an erythroid cell, wherein the erythroid cell presents, e.g. comprises on the cell surface, at least one exogenous antigenic polypeptide, wherein the at least one exogenous antigenic polypeptide is a NY-ESO-1/LAGE-2 antigen as listed in Table 1, and wherein the erythroid cell further presents, e.g. comprises on the cell surface, at least one exogenous polypeptide comprising 4-1BBL. In some embodiments, an aAPC of the present disclosure comprises an erythroid cell, wherein the erythroid cell presents, e.g. comprises on the cell surface, at least one exogenous antigenic polypeptide, wherein the at least one exogenous antigenic polypeptide is a NY-ESO-1/LAGE-2 antigen selected from the NY-ESO-1/LAGE-2 antigens listed in Table 1, and further presents, e.g. comprises on the cell surface, an exogenous antigen-presenting polypeptide, wherein the exogenous antigenic polypeptide is specifically bound to the exogenous antigen-presenting polypeptide, wherein the exogenous antigen-presenting polypeptide is a MHC Class I polypeptide or single chain fusion, or a MHC Class II polypeptide or single chain fusion, of the corresponding MHC Class I/Class II HLA listed in Table 1 for the particular NY-ESO-1/LAGE-2 antigen. In some embodiments, an aAPC of the present disclosure comprises an erythroid cell, wherein the erythroid cell presents, e.g. comprises on the cell surface, at least one exogenous antigenic polypeptide, wherein the at least one exogenous antigenic polypeptide is a NY-ESO-1/LAGE-2 antigen selected from the NY-ESO-1/LAGE-2 antigens listed in Table 1, wherein the erythroid cell further presents, e.g. comprises on the cell surface, an exogenous antigen-presenting polypeptide, wherein the exogenous antigenic polypeptide is specifically bound to the exogenous antigen-presenting polypeptide, wherein the exogenous antigen-presenting polypeptide is a MHC Class I polypeptide or single chain fusion, or a MHC Class II polypeptide or single chain fusion, of the corresponding MHC Class I/Class II HLA listed in Table 1 for the particular NY-ESO-1/LAGE-2 antigen, and wherein the erythroid cell further presents, e.g. comprises on the cell surface, at least one exogenous polypeptide comprising 4-1BBL.

[0288] Also encompassed by the disclosure is an artificial antigen presenting cell (aAPC) comprising an erythroid cell, wherein the erythroid cell presents, e.g. comprises on the cell surface, at least one exogenous antigenic polypeptide comprising a NY-ESO-1/LAGE-2 derived peptide. In some embodiments, the NY-ESO-1/LAGE-2 derived peptide is an HLA class I-binding polypeptide derived from NY-ESO-1/LAGE-2. In some embodiments, the HLA class I-binding polypeptide derived from NY-ESO-1/LAGE-2 is SLLMWITQC (SEQ ID NO: 110).

[0289] In some embodiments, the erythroid cell presents, e.g. comprises on the cell surface, at least one exogenous antigenic polypeptide comprising at least one exogenous HLA class II-binding polypeptide derived from NY-ESO-1/LAGE-2. In some embodiments, the HLA class II-binding polypeptide derived from NY-ESO-1/LAGE-2 is SLLMWITQCFLPVF (SEQ ID NO: 114).

[0290] In some embodiments, an artificial antigen presenting cell (aAPC) of the present disclosure comprises an erythroid cell, wherein the erythroid cell presents, e.g. comprises on the cell surface, at least one exogenous antigenic polypeptide, wherein the at least one exogenous antigenic polypeptide is SLLMWITQC (SEQ ID NO: 110). In some embodiments, an artificial antigen presenting cell (aAPC) of the present disclosure comprises an erythroid cell, wherein the erythroid cell presents, e.g. comprises on the cell surface, at least one exogenous antigenic polypeptide, wherein the at least one exogenous antigenic polypeptide is SLLMWITQCFLPVF (SEQ ID NO: 114).

[0291] Also encompassed by the disclosure is an artificial antigen presenting cell (aAPC) engineered to activate T cells, wherein the aAPC comprises an erythroid cell, wherein the erythroid cell presents, e.g. comprises on the cell surface, at least one exogenous antigenic polypeptide, wherein the at least one exogenous antigenic polypeptide is SLLMWITQC (SEQ ID NO: 110). In some embodiments, the disclosure features an artificial antigen presenting cell (aAPC) engineered to activate T cells, wherein the aAPC comprises an erythroid cell, wherein the erythroid cell presents, e.g. comprises on the cell surface, at least one exogenous antigenic polypeptide, wherein the at least one exogenous antigenic polypeptide is SLLMWITQCFLPVF (SEQ ID NO: 114).

[0292] Also encompassed by the disclosure is an artificial antigen presenting cell (aAPC) engineered to activate T cells, wherein the aAPC comprises an erythroid cell, wherein the erythroid cell presents, e.g. comprises on the cell surface, an exogenous antigen-presenting polypeptide and an exogenous antigenic polypeptide, wherein the exogenous antigenic polypeptide is specifically bound to the exogenous antigen-presenting polypeptide, wherein the exogenous antigen-presenting polypeptide is an MHC class I polypeptide or single chain fusion, and wherein the exogenous antigenic polypeptide is SLLMWITQC (SEQ ID NO: 110). In embodiments, the exogenous antigen-presenting polypeptide is an MHC Class I HLA-A2 or HLA-A24 polypeptide or single chain fusion. In some embodiments, the disclosure features an artificial antigen presenting cell (aAPC) engineered to activate T cells, wherein the aAPC comprises an erythroid cell, wherein the erythroid cell presents, e.g. comprises on the cell surface, an exogenous antigen-presenting polypeptide and an exogenous antigenic polypeptide, wherein the exogenous antigenic polypeptide is specifically bound to the exogenous antigen-presenting polypeptide, wherein the exogenous antigen-presenting polypeptide is an MHC class II single chain fusion, and wherein the exogenous antigenic polypeptide is SLLMWITQCFLPVF (SEQ ID NO: 114). In embodiments, the exogenous antigen-presenting polypeptide is an MHC Class II DP4 polypeptide or single chain fusion.

[0293] In one particular embodiment, an artificial antigen presenting cell comprises an erythroid cell, wherein the erythroid cell presents, e.g. comprises on the cell surface, at least one exogenous antigenic polypeptide, SLLMWITQC (SEQ ID NO: 110), fused to an exogenous antigen presenting polypeptide, MHCI HLA-A2 or HLA-24, fused to the GPA transmembrane domain (GPA).

[0294] In one particular embodiment, an artificial antigen presenting cell comprises an erythroid cell, wherein the erythroid cell presents, e.g. comprises on the cell surface, at least one exogenous antigenic polypeptide, SLLMWITQCFLPVF (SEQ ID NO: 114), fused to an exogenous antigen presenting polypeptide, MHCII HLA-DP4, fused to the GPA transmembrane domain (GPA).

[0295] In embodiments, the at least one exogenous antigenic polypeptide is a NY-ESO-1/LAGE-2 antigen selected from SLLMWITQC (SEQ ID NO: 110), MLMAQEALAFL (SEQ ID NO: 109), YLAMPFATPME (SEQ ID NO: 204), ASGPGGGAPR (SEQ ID NO: 205), LAAQERRVPR (SEQ ID NO: 111), TVSGNILTIR (SEQ ID NO: 206), APRGPHGGAASGL (SEQ ID NO: 207), MPFATPMEAEL (SEQ ID NO: 208), KEFTVSGNILTI (SEQ ID NO: 209), MPFATPMEA (SEQ ID NO: 210), FATPMEAEL (SEQ ID NO: 211), FATPMEAELAR (SEQ ID NO: 212), LAMPFATPM (SEQ ID NO: 213), ARGPESRLL (SEQ ID NO: 214), SLLMWITQCFLPVF (SEQ ID NO: 114), LLEFYLAMPFATPMEAELARRSLAQ (SEQ ID NO: 215), LLEFYLAMPFATPMEAELARRSLAQ (SEQ ID NO: 215), EFYLAMPFATPM (SEQ ID NO: 216), PGVLLKEFTVSGNILTIRLTAADHR (SEQ ID NO: 217), RLLEFYLAMPFA (SEQ ID NO: 218), QGAMLAAQERRVPRAAEVPR (SEQ ID NO: 115), PFATPMEAELARR (SEQ ID NO: 219), PGVLLKEFTVSGNILTIRLT (SEQ ID NO: 220), VLLKEFTVSG (SEQ ID NO: 221), AADHRQLQLSISSCLQQL (SEQ ID NO: 116), LLEFYLAMPFATPMEAELARRSLAQ (SEQ ID NO: 215), LKEFTVSGNILTIRL (SEQ ID NO: 222), PGVLLKEFTVSGNILTIRLTAADHR (SEQ ID NO: 217), LLEFYLAMPFATPMEAELARRSLAQ (SEQ ID NO: 215), KEFTVSGNILT (SEQ ID NO: 223), LLEFYLAMPFATPM (SEQ ID NO: 224), and AGATGGRGPRGAGA (SEQ ID NO: 119).

[0296] In some embodiments, an aAPC of the present disclosure comprises an erythroid cell, wherein the erythroid cell presents, e.g. comprises on the cell surface, at least one exogenous antigenic polypeptide, wherein the at least one exogenous antigenic polypeptide is a NY-ESO-1/LAGE-2 antigen selected from SLLMWITQC (SEQ ID NO: 110), MLMAQEALAFL (SEQ ID NO: 109), YLAMPFATPME (SEQ ID NO: 204), ASGPGGGAPR (SEQ ID NO: 205), LAAQERRVPR (SEQ ID NO: 111), TVSGNILTIR (SEQ ID NO: 206), APRGPHGGAASGL (SEQ ID NO: 207), MPFATPMEAEL (SEQ ID NO: 208), KEFTVSGNILTI (SEQ ID NO: 209), MPFATPMEA (SEQ ID NO: 210), FATPMEAEL (SEQ ID NO: 211), FATPMEAELAR (SEQ ID NO: 212), LAMPFATPM (SEQ ID NO: 213), ARGPESRLL (SEQ ID NO: 214), SLLMWITQCFLPVF (SEQ ID NO: 114), LLEFYLAMPFATPMEAELARRSLAQ (SEQ ID NO: 215), LLEFYLAMPFATPMEAELARRSLAQ (SEQ ID NO: 215), EFYLAMPFATPM (SEQ ID NO: 216), PGVLLKEFTVSGNILTIRLTAADHR (SEQ ID NO: 217), RLLEFYLAMPFA (SEQ ID NO: 218), QGAMLAAQERRVPRAAEVPR (SEQ ID NO: 115), PFATPMEAELARR (SEQ ID NO: 219), PGVLLKEFTVSGNILTIRLT (SEQ ID NO: 220), VLLKEFTVSG (SEQ ID NO: 221), AADHRQLQLSISSCLQQL (SEQ ID NO: 116), LLEFYLAMPFATPMEAELARRSLAQ (SEQ ID NO: 215), LKEFTVSGNILTIRL (SEQ ID NO: 222), PGVLLKEFTVSGNILTIRLTAADHR (SEQ ID NO: 217), LLEFYLAMPFATPMEAELARRSLAQ (SEQ ID NO: 215), KEFTVSGNILT (SEQ ID NO: 223), LLEFYLAMPFATPM (SEQ ID NO: 224), and AGATGGRGPRGAGA (SEQ ID NO: 119), wherein the erythroid cell further presents, e.g. comprises on the cell surface, at least one exogenous polypeptide comprising 4-1BBL.

[0297] In some embodiments, an aAPC of the present disclosure comprises an erythroid cell, wherein the erythroid cell presents, e.g. comprises on the cell surface, at least one exogenous antigenic polypeptide, wherein the at least one exogenous antigenic polypeptide is a NY-ESO-1/LAGE-2 antigen selected from SLLMWITQC (SEQ ID NO: 110), MLMAQEALAFL (SEQ ID NO: 109), YLAMPFATPME (SEQ ID NO: 204), ASGPGGGAPR (SEQ ID NO: 205), LAAQERRVPR (SEQ ID NO: 111), TVSGNILTIR (SEQ ID NO: 206), APRGPHGGAASGL (SEQ ID NO: 207), MPFATPMEAEL (SEQ ID NO: 208), KEFTVSGNILTI (SEQ ID NO: 209), MPFATPMEA (SEQ ID NO: 210), FATPMEAEL (SEQ ID NO: 211), FATPMEAELAR (SEQ ID NO: 212), LAMPFATPM (SEQ ID NO: 213), ARGPESRLL (SEQ ID NO: 214), SLLMWITQCFLPVF (SEQ ID NO: 114), LLEFYLAMPFATPMEAELARRSLAQ (SEQ ID NO: 215), LLEFYLAMPFATPMEAELARRSLAQ (SEQ ID NO: 215), EFYLAMPFATPM (SEQ ID NO: 216), PGVLLKEFTVSGNILTIRLTAADHR (SEQ ID NO: 217), RLLEFYLAMPFA (SEQ ID NO: 218), QGAMLAAQERRVPRAAEVPR (SEQ ID NO: 115), PFATPMEAELARR (SEQ ID NO: 219), PGVLLKEFTVSGNILTIRLT (SEQ ID NO: 220), VLLKEFTVSG (SEQ ID NO: 221), AADHRQLQLSISSCLQQL (SEQ ID NO: 116), LLEFYLAMPFATPMEAELARRSLAQ (SEQ ID NO: 215), LKEFTVSGNILTIRL (SEQ ID NO: 222), PGVLLKEFTVSGNILTIRLTAADHR (SEQ ID NO: 217), LLEFYLAMPFATPMEAELARRSLAQ (SEQ ID NO: 215), KEFTVSGNILT (SEQ ID NO: 223), LLEFYLAMPFATPM (SEQ ID NO: 224), and AGATGGRGPRGAGA (SEQ ID NO: 119), wherein the erythroid cell further presents, e.g. comprises on the cell surface, an exogenous antigen-presenting polypeptide, wherein the exogenous antigenic polypeptide is specifically bound to the exogenous antigen-presenting polypeptide, wherein the exogenous antigen-presenting polypeptide is a MHC Class I polypeptide or single chain fusion, or a MHC Class II polypeptide or single chain fusion, of the corresponding MHC Class I/Class II HLA listed in Table 1 for the particular NY-ESO-1/LAGE-2 antigen, and wherein the erythroid cell further presents, e.g. comprises on the cell surface, at least one exogenous polypeptide comprising 4-1BBL.

[0298] In some embodiments, an artificial antigen presenting cell (aAPC) of the present disclosure comprises an erythroid cell, wherein the erythroid cell presents, e.g. comprises on the cell surface, at least one exogenous antigenic polypeptide, wherein the at least one exogenous antigenic polypeptide is SLLMWITQC (SEQ ID NO: 110), and wherein the erythroid cell further presents, e.g. comprises on the cell surface, an exogenous polypeptide comprising 4-1BBL.

[0299] In some embodiments, an artificial antigen presenting cell (aAPC) of the present disclosure comprises an erythroid cell, wherein the erythroid cell presents, e.g. comprises on the cell surface, at least one exogenous antigenic polypeptide, wherein the at least one exogenous antigenic polypeptide is SLLMWITQCFLPVF (SEQ ID NO: 114), and wherein the erythroid cell further presents, e.g. comprises on the cell surface, an exogenous polypeptide comprising 4-1BBL.

[0300] An aAPC as described herein, comprising (e.g. comprising on the cell surface), an exogenous antigenic polypeptide comprising a NY-ESO-1/LAGE-2 antigen, can be used in the treatment of cancer, as described in more detail below. An aAPC as described herein, comprising (e.g. comprising on the cell surface) an exogenous antigenic polypeptide comprising a NY-ESO-1/LAGE-2 antigen, and further comprising (e.g. comprising on the cell surface) an exogenous polypeptide comprising 4-1BBL, can be used in the treatment of cancer, as described in more detail below. An aAPC as described herein, comprising (e.g. comprising on the cell surface) at least one exogenous NY-ESO-1/LAGE-2 derived peptide (e.ge.g., SLLMWITQC (SEQ ID NO: 110) or SLLMWITQCFLPVF (SEQ ID NO: 114)) as described herein, can be used in the treatment of cancer, as described in more detail below. An aAPC as described herein, comprising (e.g. comprising on the cell surface) at least one exogenous NY-ESO-1/LAGE-2 derived peptide (e.g., SLLMWITQC (SEQ ID NO: 110) or SLLMWITQCFLPVF (SEQ ID NO: 114)), and further comprising an exogenous polypeptide comprising 4-1BBL, as described herein, can be used in the treatment of cancer, as described in more detail below.

[0301] Telomerase/hTERT

[0302] Telomerase reverse transcriptase (abbreviated to TERT, or hTERT in humans) is a ribonucleoprotein enzyme essential for the replication of chromosome termini in most eukaryotes. Telomerase maintains telomere ends by addition of the telomere repeat TTAGGG. Telomerase expression plays a role in cellular senescence, as it is normally repressed in postnatal somatic cells, resulting in progressive shortening of telomeres. Telomerase activity is associated with the number of times a cell can divide playing an important role in the immortality of cell lines, such as cancer cells.

[0303] In some embodiments, an artificial antigen presenting cell (aAPC) of the present disclosure comprises an erythroid cell, wherein the erythroid cell presents, e.g. comprises on the cell surface, at least one exogenous antigenic polypeptide, wherein the at least one exogenous antigenic polypeptide is a telomerase antigen. In some embodiments, an artificial antigen presenting cell (aAPC) of the present disclosure comprises an erythroid cell, wherein the erythroid cell presents, e.g. comprises on the cell surface, at least one exogenous antigenic polypeptide, wherein the at least one exogenous antigenic polypeptide is a telomerase antigen, and wherein the erythroid cell further presents, e.g. comprises on the cell surface, an exogenous polypeptide comprising 4-1BBL. In some embodiments, an artificial antigen presenting cell (aAPC) of the present disclosure comprises an erythroid cell, wherein the erythroid cell presents, e.g. comprises on the cell surface, at least one exogenous antigenic polypeptide, wherein the at least one exogenous antigenic polypeptide is a human telomerase (hTERT) antigen. In some embodiments, an artificial antigen presenting cell (aAPC) of the present disclosure comprises an erythroid cell, wherein the erythroid cell presents, e.g. comprises on the cell surface, at least one exogenous antigenic polypeptide, wherein the at least one exogenous antigenic polypeptide is a human telomerase (hTERT) antigen, and wherein the erythroid cell further presents, e.g. comprises on the cell surface, an exogenous polypeptide comprising 4-1BBL. In some embodiments, the erythroid cell is an enucleated cell. In some embodiments, the erythroid cell is a nucleated cell.

[0304] In another aspect, the disclosure features an artificial antigen presenting cell (aAPC) engineered to activate T cells, wherein the aAPC comprises an erythroid cell, wherein the erythroid cell presents, e.g. comprises on the cell surface, an exogenous antigen-presenting polypeptide and an exogenous antigenic polypeptide, wherein the exogenous antigenic polypeptide is specifically bound to the exogenous antigen-presenting polypeptide, wherein the exogenous antigen-presenting polypeptide is an MHC class I polypeptide or single chain fusion or an MHC class II polypeptide or single chain fusion, wherein the exogenous antigenic polypeptide is a telomerase antigen. In some embodiments, the telomerase antigen is human telomerase (hTERT) antigen. In some embodiments, the erythroid cell is an enucleated cell. In some embodiments, the erythroid cell is a nucleated cell.

[0305] In another aspect, the disclosure features an artificial antigen presenting cell (aAPC) engineered to activate T cells, wherein the aAPC comprises an erythroid cell, wherein the erythroid cell presents, e.g. comprises on the cell surface, an exogenous antigen-presenting polypeptide and an exogenous antigenic polypeptide, wherein the exogenous antigenic polypeptide is specifically bound to the exogenous antigen-presenting polypeptide, wherein the exogenous antigen-presenting polypeptide is an MHC class I polypeptide or single chain fusion or an MHC class II polypeptide or single chain fusion, wherein the exogenous antigenic polypeptide is a telomerase antigen, and wherein the erythroid cell further presents, e.g. comprises on the cell surface, an exogenous polypeptide comprising 4-1BBL. In some embodiments, the telomerase antigen is human telomerase (hTERT) antigen. In some embodiments, the erythroid cell is an enucleated cell. In some embodiments, the erythroid cell is a nucleated cell.

[0306] Also encompassed by the disclosure is an artificial antigen presenting cell (aAPC) comprising an erythroid cell, wherein the erythroid cell presents, e.g. comprises on the cell surface, at least one exogenous antigenic polypeptide, wherein the exogenous antigenic polypeptide is ILAKFLHWL (SEQ ID NO: 658). Also encompassed by the disclosure is an artificial antigen presenting cell (aAPC) comprising an erythroid cell, wherein the erythroid cell presents, e.g. comprises on the cell surface, at least one exogenous antigenic polypeptide, wherein the exogenous antigenic polypeptide is RLVDDFLLV (SEQ ID NO: 659). Also encompassed by the disclosure is an artificial antigen presenting cell (aAPC) comprising an erythroid cell, wherein the erythroid cell presents, e.g. comprises on the cell surface, at least one exogenous antigenic polypeptide, wherein the exogenous antigenic polypeptide is RPGLLGASVLGLDDI (SEQ ID NO: 663). Also encompassed by the disclosure is an artificial antigen presenting cell (aAPC) comprising an erythroid cell, wherein the erythroid cell presents, e.g. comprises on the cell surface, at least one exogenous antigenic polypeptide, wherein the exogenous antigenic polypeptide is LTDLQPYMRQFVAHL (SEQ ID NO: 664). Also encompassed by the disclosure is an artificial antigen presenting cell (aAPC) engineered to activate T cells, wherein the aAPC comprises an erythroid cell, wherein the erythroid cell presents, e.g. comprises on the cell surface, at least one exogenous antigenic polypeptide, wherein the at least one exogenous antigenic polypeptide is ILAKFLHWL (SEQ ID NO: 658). Also encompassed by the disclosure is an artificial antigen presenting cell (aAPC) engineered to activate T cells, wherein the aAPC comprises an erythroid cell, wherein the erythroid cell presents, e.g. comprises on the cell surface, at least one exogenous antigenic polypeptide, wherein the at least one exogenous antigenic polypeptide is RLVDDFLLV (SEQ ID NO: 659). Also encompassed by the disclosure is an artificial antigen presenting cell (aAPC) engineered to activate T cells, wherein the aAPC comprises an erythroid cell, wherein the erythroid cell presents, e.g. comprises on the cell surface, at least one exogenous antigenic polypeptide, wherein the at least one exogenous antigenic polypeptide is RPGLLGASVLGLDDI (SEQ ID NO: 663). Also encompassed by the disclosure is an artificial antigen presenting cell (aAPC) engineered to activate T cells, wherein the aAPC comprises an erythroid cell, wherein the erythroid cell presents, e.g. comprises on the cell surface, at least one exogenous antigenic polypeptide, wherein the at least one exogenous antigenic polypeptide is LTDLQPYMRQFVAHL (SEQ ID NO: 664). Also encompassed by the disclosure is an artificial antigen presenting cell (aAPC) comprising an erythroid cell, wherein the erythroid cell presents, e.g. comprises on the cell surface, at least one exogenous antigenic polypeptide, wherein the exogenous antigenic polypeptide is ILAKFLHWL (SEQ ID NO: 658), and wherein the erythroid cell further presents, e.g. comprises on the cell surface, an exogenous polypeptide comprising 4-1BBL. Also encompassed by the disclosure is an artificial antigen presenting cell (aAPC) comprising an erythroid cell, wherein the erythroid cell presents, e.g. comprises on the cell surface, at least one exogenous antigenic polypeptide, wherein the exogenous antigenic polypeptide is RLVDDFLLV SEQ ID NO: 659), and wherein the erythroid cell further presents, e.g. comprises on the cell surface, an exogenous polypeptide comprising 4-1BBL. Also encompassed by the disclosure is an artificial antigen presenting cell (aAPC) comprising an erythroid cell, wherein the erythroid cell presents, e.g. comprises on the cell surface, at least one exogenous antigenic polypeptide, wherein the exogenous antigenic polypeptide is RPGLLGASVLGLDDI (SEQ ID NO: 663), and wherein the erythroid cell further presents, e.g. comprises on the cell surface, an exogenous polypeptide comprising 4-1BBL. Also encompassed by the disclosure is an artificial antigen presenting cell (aAPC) comprising an erythroid cell, wherein the erythroid cell presents, e.g. comprises on the cell surface, at least one exogenous antigenic polypeptide, wherein the exogenous antigenic polypeptide is LTDLQPYMRQFVAHL (SEQ ID NO: 664), and wherein the erythroid cell further presents, e.g. comprises on the cell surface, an exogenous polypeptide comprising 4-1BBL. Also encompassed by the disclosure is an artificial antigen presenting cell (aAPC) engineered to activate T cells, wherein the aAPC comprises an erythroid cell, wherein the erythroid cell presents, e.g. comprises on the cell surface, at least one exogenous antigenic polypeptide, wherein the at least one exogenous antigenic polypeptide is ILAKFLHWL (SEQ ID NO: 658), and wherein the erythroid cell further presents, e.g. comprises on the cell surface, an exogenous polypeptide comprising 4-1BBL. Also encompassed by the disclosure is an artificial antigen presenting cell (aAPC) engineered to activate T cells, wherein the aAPC comprises an erythroid cell, wherein the erythroid cell presents, e.g. comprises on the cell surface, at least one exogenous antigenic polypeptide, wherein the at least one exogenous antigenic polypeptide is RLVDDFLLV (SEQ ID NO: 659), and wherein the erythroid cell further presents, e.g. comprises on the cell surface, an exogenous polypeptide comprising 4-1BBL. Also encompassed by the disclosure is an artificial antigen presenting cell (aAPC) engineered to activate T cells, wherein the aAPC comprises an erythroid cell, wherein the erythroid cell presents, e.g. comprises on the cell surface, at least one exogenous antigenic polypeptide, wherein the at least one exogenous antigenic polypeptide is RPGLLGASVLGLDDI (SEQ ID NO: 663), and wherein the erythroid cell further presents, e.g. comprises on the cell surface, an exogenous polypeptide comprising 4-1BBL. Also encompassed by the disclosure is an artificial antigen presenting cell (aAPC) engineered to activate T cells, wherein the aAPC comprises an erythroid cell, wherein the erythroid cell presents, e.g. comprises on the cell surface, at least one exogenous antigenic polypeptide, wherein the at least one exogenous antigenic polypeptide is LTDLQPYMRQFVAHL (SEQ ID NO: 664), and wherein the erythroid cell further presents, e.g. comprises on the cell surface, an exogenous polypeptide comprising 4-1BBL.

[0307] Also encompassed by the disclosure is an artificial antigen presenting cell (aAPC) engineered to activate T cells, wherein the aAPC comprises an erythroid cell, wherein the erythroid cell presents, e.g. comprises on the cell surface, an exogenous antigen-presenting polypeptide and an exogenous antigenic polypeptide, wherein the exogenous antigenic polypeptide is specifically bound to the exogenous antigen-presenting polypeptide, wherein the exogenous antigen-presenting polypeptide is an MHC class I polypeptide or single chain fusion, and wherein the exogenous antigenic polypeptide is ILAKFLHWL (SEQ ID NO: 658). In embodiments, the exogenous antigen-presenting polypeptide is an MHC Class I HLA-A2 polypeptide or single chain fusion. In some embodiments, the exogenous antigen-presenting polypeptide is an MHC Class I HLA-A2 single chain fusion.

[0308] Also encompassed by the disclosure is an artificial antigen presenting cell (aAPC) engineered to activate T cells, wherein the aAPC comprises an erythroid cell, wherein the erythroid cell presents, e.g. comprises on the cell surface, an exogenous antigen-presenting polypeptide and an exogenous antigenic polypeptide, wherein the exogenous antigenic polypeptide is specifically bound to the exogenous antigen-presenting polypeptide, wherein the exogenous antigen-presenting polypeptide is an MHC class I polypeptide or single chain fusion, and wherein the exogenous antigenic polypeptide is ILAKFLHWL (SEQ ID NO: 658), and wherein the erythroid cell further presents, e.g. comprises on the cell surface, an exogenous polypeptide comprising 4-1BBL. In embodiments, the exogenous antigen-presenting polypeptide is an MHC Class I HLA-A2 polypeptide or single chain fusion. In some embodiments, the exogenous antigen-presenting polypeptide is an MHC Class I HLA-A2 single chain fusion.

[0309] Also encompassed by the disclosure is an artificial antigen presenting cell (aAPC) engineered to activate T cells, wherein the aAPC comprises an erythroid cell, wherein the erythroid cell presents, e.g. comprises on the cell surface, an exogenous antigen-presenting polypeptide and an exogenous antigenic polypeptide, wherein the exogenous antigenic polypeptide is specifically bound to the exogenous antigen-presenting polypeptide, wherein the exogenous antigen-presenting polypeptide is an MHC class I polypeptide or single chain fusion, and wherein the exogenous antigenic polypeptide is RLVDDFLLV (SEQ ID NO: 659). In embodiments, the exogenous antigen-presenting polypeptide is an MHC Class I HLA-A2 polypeptide or single chain fusion. In some embodiments, the exogenous antigen-presenting polypeptide is an MHC Class I HLA-A2 single chain fusion.

[0310] Also encompassed by the disclosure is an artificial antigen presenting cell (aAPC) engineered to activate T cells, wherein the aAPC comprises an erythroid cell, wherein the erythroid cell presents, e.g. comprises on the cell surface, an exogenous antigen-presenting polypeptide and an exogenous antigenic polypeptide, wherein the exogenous antigenic polypeptide is specifically bound to the exogenous antigen-presenting polypeptide, wherein the exogenous antigen-presenting polypeptide is an MHC class I polypeptide or single chain fusion, and wherein the exogenous antigenic polypeptide is RLVDDFLLV (SEQ ID NO: 659), and wherein the erythroid cell further presents, e.g. comprises on the cell surface, an exogenous polypeptide comprising 4-1BBL. In embodiments, the exogenous antigen-presenting polypeptide is an MHC Class I HLA-A2 polypeptide or single chain fusion. In some embodiments, the exogenous antigen-presenting polypeptide is an MHC Class I HLA-A2 single chain fusion.

[0311] Also encompassed by the disclosure is an artificial antigen presenting cell (aAPC) engineered to activate T cells, wherein the aAPC comprises an erythroid cell, wherein the erythroid cell presents, e.g. comprises on the cell surface, an exogenous antigen-presenting polypeptide and an exogenous antigenic polypeptide, wherein the exogenous antigenic polypeptide is specifically bound to the exogenous antigen-presenting polypeptide, wherein the exogenous antigen-presenting polypeptide is an MHC class II polypeptide or single chain fusion, and wherein the exogenous antigenic polypeptide is RPGLLGASVLGLDDI (SEQ ID NO: 663). In embodiments, the exogenous antigen-presenting polypeptide is an MHC Class II HLA-DR7 polypeptide or single chain fusion. In some embodiments, the exogenous antigen-presenting polypeptide is an MHC Class II HLA-DR7 single chain fusion.

[0312] Also encompassed by the disclosure is an artificial antigen presenting cell (aAPC) engineered to activate T cells, wherein the aAPC comprises an erythroid cell, wherein the erythroid cell presents, e.g. comprises on the cell surface, an exogenous antigen-presenting polypeptide and an exogenous antigenic polypeptide, wherein the exogenous antigenic polypeptide is specifically bound to the exogenous antigen-presenting polypeptide, wherein the exogenous antigen-presenting polypeptide is an MHC class II polypeptide or single chain fusion, and wherein the exogenous antigenic polypeptide is RPGLLGASVLGLDDI (SEQ ID NO: 663), and wherein the erythroid cell further presents, e.g. comprises on the cell surface, an exogenous polypeptide comprising 4-1BBL. In embodiments, the exogenous antigen-presenting polypeptide is an MHC Class II HLA-DR7 polypeptide or single chain fusion. In some embodiments, the exogenous antigen-presenting polypeptide is an MHC Class II HLA-DR7 single chain fusion.

[0313] Also encompassed by the disclosure is an artificial antigen presenting cell (aAPC) engineered to activate T cells, wherein the aAPC comprises an erythroid cell, wherein the erythroid cell presents, e.g. comprises on the cell surface, an exogenous antigen-presenting polypeptide and an exogenous antigenic polypeptide, wherein the exogenous antigenic polypeptide is specifically bound to the exogenous antigen-presenting polypeptide, wherein the exogenous antigen-presenting polypeptide is an MHC class II polypeptide or single chain fusion, and wherein the exogenous antigenic polypeptide is LTDLQPYMRQFVAHL (SEQ ID NO: 664). In embodiments, the exogenous antigen-presenting polypeptide is an MHC Class II HLA-DR11 polypeptide or single chain fusion. In some embodiments, the exogenous antigen-presenting polypeptide is an MHC Class II HLA-DR11 single chain fusion.

[0314] Also encompassed by the disclosure is an artificial antigen presenting cell (aAPC) engineered to activate T cells, wherein the aAPC comprises an erythroid cell, wherein the erythroid cell presents, e.g. comprises on the cell surface, an exogenous antigen-presenting polypeptide and an exogenous antigenic polypeptide, wherein the exogenous antigenic polypeptide is specifically bound to the exogenous antigen-presenting polypeptide, wherein the exogenous antigen-presenting polypeptide is an MHC class II polypeptide or single chain fusion, and wherein the exogenous antigenic polypeptide is LTDLQPYMRQFVAHL (SEQ ID NO: 664), and wherein the erythroid cell further presents, e.g. comprises on the cell surface, an exogenous polypeptide comprising 4-1BBL. In embodiments, the exogenous antigen-presenting polypeptide is an MHC Class II HLA-DR11 polypeptide or single chain fusion. In some embodiments, the exogenous antigen-presenting polypeptide is an MHC Class II HLA-DR11 single chain fusion.

[0315] In one particular embodiment, an artificial antigen presenting cell comprises an erythroid cell, wherein the erythroid cell presents, e.g. comprises on the cell surface, at least one exogenous antigenic polypeptide, ILAKFLHWL (SEQ ID NO: 658), fused to an exogenous antigen presenting polypeptide, MHCI HLA-A2, fused to the GPA transmembrane domain (GPA).

[0316] In one particular embodiment, an artificial antigen presenting cell comprises an erythroid cell, wherein the erythroid cell presents, e.g. comprises on the cell surface, at least one exogenous antigenic polypeptide, ILAKFLHWL (SEQ ID NO: 658), fused to an exogenous antigen presenting polypeptide, MHCI HLA-A2, fused to the GPA transmembrane domain (GPA), and wherein the erythroid cell further presents, e.g. comprises on the cell surface, an exogenous polypeptide comprising 4-1BBL.

[0317] An aAPC as described herein, presenting (e.g. comprising on the cell surface) a telomerase antigen, in particular a hTERT antigen, can be used in the treatment of cancer, as described in more detail below. An aAPC as described herein, presenting (e.g. comprising on the cell surface) a telomerase antigen, in particular a hTERT antigen, and further presenting (e.g. comprising on the cell surface) an exogenous polypeptide comprising 4-1BBL, can be used in the treatment of cancer, as described in more detail below. An aAPC as described herein, presenting (e.g. comprising on the cell surface)_a hTERT antigen described above, can be used in the treatment of cancer, as described in more detail below. An aAPC as described herein, presenting (e.g. comprising on the cell surface) a hTERT antigen described above, and further presenting (e.g. comprising on the cell surface) an exogenous polypeptide comprising 4-1BBL, can be used in the treatment of cancer, as described in more detail below.

### Myelin Oligodendrocyte Glycoprotein (MOG)

[0318] Myelin Oligodendrocyte Glycoprotein (MOG) is a membrane protein expressed on the oligodendrocyte cell surface and the outermost surface of myelin sheaths. Due to this localization, MOG is a primary target antigen involved in immune-mediated demyelination. MOG protein may be involved in completion and maintenance of the myelin sheath and in cell-cell communication.

[0319] In some embodiments, an artificial antigen presenting cell (aAPC) of the present disclosure comprises an erythroid cell, wherein the erythroid cell presents, e.g. comprises on the cell surface, at least one exogenous antigenic polypeptide, wherein the at least one exogenous antigenic polypeptide is a MOG antigen. In some embodiments, an artificial antigen presenting cell (aAPC) of the present disclosure comprises an erythroid cell, wherein the erythroid cell presents, e.g. comprises on the cell surface, at least one exogenous antigenic polypeptide, wherein the at least one exogenous antigenic polypeptide is a MOG antigen, and wherein the erythroid cell further presents, e.g. comprises on the cell surface, an exogenous polypeptide comprising a coinhibitory polypeptide. In some embodiments, the coinhibitory polypeptide is PD-L1. In some embodiments, an artificial antigen presenting cell (aAPC) of the present disclosure comprises an erythroid cell, wherein the erythroid cell presents, e.g. comprises on the cell surface, at least one exogenous antigenic polypeptide, wherein the at least one exogenous antigenic polypeptide is a MOG antigen, and wherein the erythroid cell further presents, e.g. comprises on the cell surface, an exogenous polypeptide comprising a Treg expansion polypeptide. In some embodiments, the Treg expansion polypeptide is IL-2. In some embodiments, the Treg expansion polypeptide is CD25-specific IL-2. In some embodiments, the MOG antigen is human MOG antigen. In some embodiments, the erythroid cell is an enucleated cell. In some embodiments, the erythroid cell is a nucleated cell.

[0320] In another aspect, the disclosure features an artificial antigen presenting cell (aAPC) engineered to inhibit T cells, wherein the aAPC comprises an erythroid cell, wherein the erythroid cell presents, e.g. comprises on the cell surface, an exogenous antigen-presenting polypeptide and an exogenous antigenic polypeptide, wherein the exogenous antigenic polypeptide is specifically bound to the exogenous antigen-presenting polypeptide, wherein the exogenous antigen-presenting polypeptide is an MHC class I polypeptide or single chain fusion or an MHC class II polypeptide or single chain fusion, wherein the exogenous antigenic polypeptide is a MOG antigen. In another aspect, the disclosure features an artificial antigen presenting cell (aAPC) engineered to inhibit T cells, wherein the aAPC comprises an erythroid cell, wherein the erythroid cell presents, e.g. comprises on the cell surface, an exogenous antigen-presenting polypeptide and an exogenous antigenic polypeptide, wherein the exogenous antigenic polypeptide is specifically bound to the exogenous antigen-presenting polypeptide, wherein the exogenous antigen-presenting polypeptide is an MHC class I polypeptide or single chain fusion or an MHC class II polypeptide or single chain fusion, wherein the exogenous antigenic polypeptide is a MOG antigen, and wherein the erythroid cell further presents, e.g. comprises on the cell surface, an exogenous polypeptide comprising a coinhibitory polypeptide. In some embodiments, the coinhibitory polypeptide is PD-L1. In another aspect, the disclosure features an artificial antigen presenting cell (aAPC) engineered to activate regulatory T cells, wherein the aAPC comprises an erythroid cell, wherein the erythroid cell presents, e.g. comprises on the cell surface, an exogenous antigen-presenting polypeptide and an exogenous antigenic polypeptide, wherein the exogenous antigenic polypeptide is specifically bound to the exogenous antigen-presenting polypeptide, wherein the exogenous antigen-presenting polypeptide is an MHC class I polypeptide or single chain fusion or an MHC class II polypeptide or single chain fusion, wherein the exogenous antigenic polypeptide is a MOG antigen, and wherein the erythroid cell further presents, e.g. comprises on the cell surface, an exogenous polypeptide comprising a Treg expansion polypeptide. In some embodiments, the Treg expansion polypeptide is CD25-specific IL-2. In some embodiments, the MOG antigen is human MOG antigen. In some embodiments, the erythroid cell is an enucleated cell. In some embodiments, the erythroid cell is a nucleated cell.

[0321] Also encompassed by the disclosure is an artificial antigen presenting cell (aAPC) comprising an erythroid cell, wherein the erythroid cell presents, e.g. comprises on the cell surface, at least one exogenous antigenic polypeptide, wherein the exogenous antigenic polypeptide is MEVGWYRSPFSRVVHLYRNGK (SEQ ID NO: 690).

[0322] Also encompassed by the disclosure is an artificial antigen presenting cell (aAPC) comprising an erythroid cell, wherein the erythroid cell presents, e.g. comprises on the cell surface, at least one exogenous antigenic polypeptide, wherein the exogenous antigenic polypeptide is MEVGWYRSPFSRVVHLYRNGK (SEQ ID NO: 690), and wherein the erythroid cell further presents, e.g. comprises on the cell surface, an exogenous polypeptide comprising a coinhibitory polypeptide. In some embodiments, the coinhibitory polypeptide is PD-L1.

[0323] Also encompassed by the disclosure is an artificial antigen presenting cell (aAPC) comprising an erythroid cell, wherein the erythroid cell presents, e.g. comprises on the cell surface, at least one exogenous antigenic polypeptide, wherein the exogenous antigenic polypeptide is MEVGWYRSPFSRVVHLYRNGK (SEQ ID NO: 690), and wherein the erythroid cell further presents, e.g. comprises on the cell surface, an exogenous polypeptide comprising a Treg expansion polypeptide. In some embodiments, the Treg expansion polypeptide is CD25-specific IL-2.

[0324] Also encompassed by the disclosure is an artificial antigen presenting cell (aAPC) engineered to activate regulatory T cells, wherein the aAPC comprises an erythroid cell, wherein the erythroid cell presents, e.g. comprises on the cell surface, an exogenous antigen-presenting polypeptide and an exogenous antigenic polypeptide, wherein the exogenous antigenic polypeptide is specifically bound to the exogenous antigen-presenting polypeptide, wherein the exogenous antigen-presenting polypeptide is an MHC class II polypeptide or single chain fusion, and wherein the exogenous antigenic polypeptide is MEVGWYRSPFSRVVHLYRNGK (SEQ ID NO: 690).

[0325] Also encompassed by the disclosure is an artificial antigen presenting cell (aAPC) engineered to inhibit T cells, wherein the aAPC comprises an erythroid cell, wherein the erythroid cell presents, e.g. comprises on the cell surface, an exogenous antigen-presenting polypeptide and an exogenous antigenic polypeptide, wherein the exogenous antigenic polypeptide is specifically bound to the exogenous antigen-presenting polypeptide, wherein the exogenous antigen-presenting polypeptide is an MHC class II polypeptide or single chain fusion, and wherein the exogenous antigenic polypeptide is MEVGWYRSPFSRVVHLYRNGK (SEQ ID NO: 690), and wherein the erythroid cell further presents, e.g. comprises on the cell surface, an exogenous polypeptide comprising a coinhibitory polypeptide. In some embodiments, the coinhibitory polypeptide is PD-L1

[0326] In one particular embodiment, an artificial antigen presenting cell comprises an erythroid cell, wherein the erythroid cell presents, e.g. comprises on the cell surface, at least one exogenous antigenic polypeptide, wherein the exogenous antigenic polypeptide is a MOG antigen, fused to an exogenous antigen presenting polypeptide, MHCII, fused to the GPA transmembrane domain (GPA). In some embodiments, the MOG antigen is human MOG antigen. In some embodiments, the MOG antigen is fused to an exogenous antigen presenting polypeptide, MHCII, fused to GPA as a single chain fusion.

[0327] In one particular embodiment, an artificial antigen presenting cell comprises an erythroid cell, wherein the erythroid cell presents, e.g. comprises on the cell surface, at least one exogenous antigenic polypeptide, wherein the exogenous antigenic polypeptide is a MOG antigen, fused to an exogenous antigen presenting polypeptide, MHCII, fused to the GPA transmembrane domain (GPA), and wherein the erythroid cell further presents, e.g. comprises on the cell surface, an exogenous polypeptide comprising a coinhibitory polypeptide. In some embodiments, the coinhibitory polypeptide is PD-L1. In some embodiments, the MOG antigen is human MOG antigen. In some embodiments, the MOG antigen is fused to an exogenous antigen presenting polypeptide, MHCII, fused to GPA as a single chain fusion.

[0328] In one particular embodiment, an artificial antigen presenting cell comprises an erythroid cell, wherein the erythroid cell presents, e.g. comprises on the cell surface, at least one exogenous antigenic polypeptide, wherein the exogenous antigenic polypeptide is a MOG antigen, fused to an exogenous antigen presenting polypeptide, MHCII, fused to the GPA transmembrane domain (GPA), and wherein the erythroid cell further presents, e.g. comprises on the cell surface, an exogenous polypeptide comprising a Treg expansion polypeptide. In some embodiments, the Treg expansion polypeptide is IL-2. In some embodiments, the Treg expansion polypeptide is CD25-specific IL-2. In some embodiments, the MOG antigen is human MOG antigen. In some embodiments, the MOG antigen is fused to an exogenous antigen presenting polypeptide, MHCII, fused to GPA as a single chain fusion.

[0329] An aAPC as described herein, presenting (e.g. comprising on the cell surface) a MOG antigen, can be used in the treatment of multiple sclerosis, as described in more detail below. An aAPC as described herein, presenting (e.g. comprising on the cell surface) a MOG antigen, and further presenting (e.g. comprising on the cell surface) an exogenous polypeptide comprising a coinhibitory polypeptide, can be used in the treatment of multiple sclerosis, as described in more detail below. An aAPC as described herein, presenting (e.g. comprising on the cell surface) a MOG antigen, and further presenting (e.g. comprising on the cell surface) an exogenous polypeptide comprising a coinhibitory polypeptide, wherein the coinhibitory polypeptide is PD-L1, can be used in the treatment of multiple sclerosis, as described in more detail below. An aAPC as described herein, presenting (e.g. comprising on the cell surface) a MOG antigen, and further presenting (e.g. comprising on the cell surface) an exogenous polypeptide comprising a Treg expansion polypeptide, can be used in the treatment of multiple sclerosis, as described in more detail below. An aAPC as described herein, presenting (e.g. comprising on the cell surface) a MOG antigen, and further presenting (e.g. comprising on the cell surface) an exogenous polypeptide comprising a Treg expansion polypeptide, wherein the Treg expansion polypeptide is CD25-specific IL-2, can be used in the treatment of multiple sclerosis, as described in more detail below.

gp100

[0330] Glycoprotein 100, gp100 or Melanocyte protein PMEL is a type I transmembrane glycoprotein enriched in melanosomes.

[0331] In some embodiments, an artificial antigen presenting cell (aAPC) of the present disclosure comprises an erythroid cell, wherein the erythroid cell presents, e.g. comprises on the cell surface, at least one exogenous antigenic polypeptide, wherein the at least one exogenous antigenic polypeptide is a gp100 antigen. In some embodiments, an artificial antigen presenting cell (aAPC) of the present disclosure comprises an erythroid cell, wherein the erythroid cell presents, e.g. comprises on the cell surface, at least one exogenous antigenic polypeptide, wherein the at least one exogenous antigenic polypeptide is a gp100 antigen, and wherein the erythroid cell further presents, e.g. comprises on the cell surface, an exogenous polypeptide comprising a costimulatory polypeptide. In some embodiments, the costimulatory polypeptide is 4-1BBL. In some embodiments, the gp100 antigen is human gp100 antigen. In some embodiments, the erythroid cell is an enucleated cell. In some embodiments, the erythroid cell is a nucleated cell.

[0332] In another aspect, the disclosure features an artificial antigen presenting cell (aAPC) engineered to activate T cells, wherein the aAPC comprises an erythroid cell, wherein the erythroid cell presents, e.g. comprises on the cell surface, an exogenous antigen-presenting polypeptide and an exogenous antigenic polypeptide, wherein the exogenous antigenic polypeptide is specifically bound to the exogenous antigen-presenting polypeptide, wherein the exogenous antigen-presenting polypeptide is an MHC class I polypeptide or single chain fusion or an MHC class II polypeptide or single chain fusion, wherein the exogenous antigenic polypeptide is a gp100 antigen. In some embodiments, the exogenous antigen-presenting polypeptide is MHCI. In another aspect, the disclosure features an artificial antigen presenting cell (aAPC) engineered to activate T cells, wherein the aAPC comprises an erythroid cell, wherein the erythroid cell presents, e.g. comprises on the cell surface, an exogenous antigen-presenting polypeptide and an exogenous antigenic polypeptide, wherein the exogenous antigenic polypeptide is specifically bound to the exogenous antigen-presenting polypeptide, wherein the exogenous antigen-presenting polypeptide is an MHC class I polypeptide or single chain fusion or an MHC class II polypeptide or single chain fusion, wherein the exogenous antigenic polypeptide is a gp100 antigen, and wherein the erythroid cell further presents, e.g. comprises on the cell surface, an exogenous polypeptide comprising a costimulatory polypeptide. In some embodiments, the costimulatory polypeptide is 4-1BBL. In some embodiments, the exogenous antigen-presenting polypeptide is MHCI. In some embodiments, the gp100 antigen is human gp100 antigen. In some embodiments, the erythroid cell is an enucleated cell. In some embodiments, the erythroid cell is a nucleated cell.

[0333] Also encompassed by the disclosure is an artificial antigen presenting cell (aAPC) comprising an erythroid cell, wherein the erythroid cell presents, e.g. comprises on the cell surface, at least one exogenous antigenic polypeptide, wherein the exogenous antigenic polypeptide is RLMKQDFSV (SEQ ID NO: 314). Also encompassed by the disclosure is an artificial antigen presenting cell (aAPC) comprising an erythroid cell, wherein the erythroid cell presents, e.g. comprises on the cell surface, at least one exogenous antigenic polypeptide, wherein the exogenous antigenic polypeptide is RLPRIFCSC (SEQ ID NO: 315). Also encompassed by the disclosure is an artificial antigen presenting cell (aAPC) comprising an erythroid cell, wherein the erythroid cell presents, e.g. comprises on the cell surface, at least one exogenous antigenic polypeptide, wherein the exogenous antigenic polypeptide is LIYRRRLMK (SEQ ID NO: 316). Also encompassed by the disclosure is an artificial antigen presenting cell (aAPC) comprising an erythroid cell, wherein the erythroid cell presents, e.g. comprises on the cell surface, at least one exogenous antigenic polypeptide, wherein the exogenous antigenic polypeptide is ALLAVGATK (SEQ ID NO: 317). Also encompassed by the disclosure is an artificial antigen presenting cell (aAPC) comprising an erythroid cell, wherein the erythroid cell presents, e.g. comprises on the cell surface, at least one exogenous antigenic polypeptide, wherein the exogenous antigenic polypeptide is IALNFPGSQK (SEQ ID NO: 318). Also encompassed by the disclosure is an artificial antigen presenting cell (aAPC) comprising an erythroid cell, wherein the erythroid cell presents, e.g. comprises on the cell surface, at least one exogenous antigenic polypeptide, wherein the exogenous antigenic polypeptide is RSYVPLAHR (SEQ ID NO: 319). Also encompassed by the disclosure is an artificial antigen presenting cell (aAPC) comprising an erythroid cell, wherein the erythroid cell presents, e.g. comprises on the cell surface, at least one exogenous antigenic polypeptide, wherein the exogenous antigenic polypeptide is ALNFPGSQK (SEQ ID NO: 320). Also encompassed by the disclosure is an artificial antigen presenting cell (aAPC) comprising an erythroid cell, wherein the erythroid cell presents, e.g. comprises on the cell surface, at least one exogenous antigenic polypeptide, wherein the exogenous antigenic polypeptide is ALNFPGSQK (SEQ ID NO: 320). Also encompassed by the disclosure is an artificial antigen presenting cell (aAPC) comprising an erythroid cell, wherein the erythroid cell presents, e.g. comprises on the cell surface, at least one exogenous antigenic polypeptide, wherein the exogenous antigenic polypeptide is VYFFLPDHL (SEQ ID NO: 321). Also encompassed by the disclosure is an artificial antigen presenting cell (aAPC) comprising an erythroid cell, wherein the erythroid cell presents, e.g. comprises on the cell surface, at least one exogenous antigenic polypeptide, wherein the exogenous antigenic polypeptide is RTKQLYPEW (SEQ ID NO: 322). Also encompassed by the disclosure is an artificial antigen presenting cell (aAPC) comprising an erythroid cell, wherein the erythroid cell presents, e.g. comprises on the cell surface, at least one exogenous antigenic polypeptide, wherein the exogenous antigenic polypeptide is HTMEVTVYHR (SEQ ID NO: 323). Also encompassed by the disclosure is an artificial antigen presenting cell (aAPC) comprising an erythroid cell, wherein the erythroid cell presents, e.g. comprises on the cell surface, at least one exogenous antigenic polypeptide, wherein the exogenous antigenic polypeptide is SSPGCQPPA (SEQ ID NO: 324). Also encompassed by the disclosure is an artificial antigen presenting cell (aAPC) comprising an erythroid cell, wherein the erythroid cell presents, e.g. comprises on the cell surface, at least one exogenous antigenic polypeptide, wherein the exogenous antigenic polypeptide is VPLDCVLYRY (SEQ ID NO: 325). Also encompassed by the disclosure is an artificial antigen presenting cell (aAPC) comprising an erythroid cell, wherein the erythroid cell presents, e.g. comprises on the cell surface, at least one exogenous antigenic polypeptide, wherein the exogenous antigenic polypeptide is LPHSSSHWL (SEQ ID NO: 326). Also encompassed by the disclosure is an artificial antigen presenting cell (aAPC) comprising an erythroid cell, wherein the erythroid cell presents, e.g. comprises on the cell surface, at least one exogenous antigenic polypeptide, wherein the exogenous antigenic polypeptide is SNDGPTLI (SEQ ID NO: 327). Also encompassed by the disclosure is an artificial antigen presenting cell (aAPC) comprising an erythroid cell, wherein the erythroid cell presents, e.g. comprises on the cell surface, at least one exogenous antigenic polypeptide, wherein the exogenous antigenic polypeptide is GRAMLGTHTMEVTVY (SEQ ID NO: 328). Also encompassed by the disclosure is an artificial antigen presenting cell (aAPC) comprising an erythroid cell, wherein the erythroid cell presents, e.g. comprises on the cell surface, at least one exogenous antigenic polypeptide, wherein the exogenous antigenic polypeptide is WNRQLYPEWTEAQRLD (SEQ ID NO: 329). Also encompassed by the disclosure is an artificial antigen presenting cell (aAPC) comprising an erythroid cell, wherein the erythroid cell presents, e.g. comprises on the cell surface, at least one exogenous antigenic polypeptide, wherein the exogenous antigenic polypeptide is TTEWVETTARELPIPEPE (SEQ ID NO: 330). Also encompassed by the disclosure is an artificial antigen presenting cell (aAPC) comprising an erythroid cell, wherein the erythroid cell presents, e.g. comprises on the cell surface, at least one exogenous antigenic polypeptide, wherein the exogenous antigenic polypeptide is TGRAMLGTHTMEVTVYH (SEQ ID NO: 331). Also encompassed by the disclosure is an artificial antigen presenting cell (aAPC) comprising an erythroid cell, wherein the erythroid cell presents, e.g. comprises on the cell surface, at least one exogenous antigenic polypeptide, wherein the exogenous antigenic polypeptide is GRAMLGTHTMEVTVY (SEQ ID NO: 328).

[0334] Also encompassed by the disclosure is an artificial antigen presenting cell (aAPC) comprising an erythroid cell, wherein the erythroid cell presents, e.g. comprises on the cell surface, at least one exogenous antigenic polypeptide, wherein the exogenous antigenic polypeptide is RLMKQDFSV (SEQ ID NO: 314), wherein the erythroid cell further presents, e.g. comprises on the cell surface, an exogenous polypeptide comprising a costimulatory polypeptide. In some embodiments, the costimulatory polypeptide is 4-1BBL. Also encompassed by the disclosure is an artificial antigen presenting cell (aAPC) comprising an erythroid cell, wherein the erythroid cell presents, e.g. comprises on the cell surface, at least one exogenous antigenic polypeptide, wherein the exogenous antigenic polypeptide is RLPRIFCSC (SEQ ID NO: 315), wherein the erythroid cell further presents, e.g. comprises on the cell surface, an exogenous polypeptide comprising a costimulatory polypeptide. In some embodiments, the costimulatory polypeptide is 4-1BBL. Also encompassed by the disclosure is an artificial antigen presenting cell (aAPC) comprising an erythroid cell, wherein the erythroid cell presents, e.g. comprises on the cell surface, at least one exogenous antigenic polypeptide, wherein the exogenous antigenic polypeptide is LIYRRRLMK (SEQ ID NO: 316), wherein the erythroid cell further presents, e.g. comprises on the cell surface, an exogenous polypeptide comprising a costimulatory polypeptide. In some embodiments, the costimulatory polypeptide is 4-1BBL. Also encompassed by the disclosure is an artificial antigen presenting cell (aAPC) comprising an erythroid cell, wherein the erythroid cell presents, e.g. comprises on the cell surface, at least one exogenous antigenic polypeptide, wherein the exogenous antigenic polypeptide is ALLAVGATK (SEQ ID NO: 317), wherein the erythroid cell further presents, e.g. comprises on the cell surface, an exogenous polypeptide comprising a costimulatory polypeptide. In some embodiments, the costimulatory polypeptide is 4-1BBL. Also encompassed by the disclosure is an artificial antigen presenting cell (aAPC) comprising an erythroid cell, wherein the erythroid cell presents, e.g. comprises on the cell surface, at least one exogenous antigenic polypeptide, wherein the exogenous antigenic polypeptide is IALNFPGSQK (SEQ ID NO: 318), wherein the erythroid cell further presents, e.g. comprises on the cell surface, an exogenous polypeptide comprising a costimulatory polypeptide. In some embodiments, the costimulatory polypeptide is 4-1BBL. Also encompassed by the disclosure is an artificial antigen presenting cell (aAPC) comprising an erythroid cell, wherein the erythroid cell presents, e.g. comprises on the cell surface, at least one exogenous antigenic polypeptide, wherein the exogenous antigenic polypeptide is RSYVPLAHR (SEQ ID NO: 319), wherein the erythroid cell further presents, e.g. comprises on the cell surface, an exogenous polypeptide comprising a costimulatory polypeptide. In some embodiments, the costimulatory polypeptide is 4-1BBL. Also encompassed by the disclosure is an artificial antigen presenting cell (aAPC) comprising an erythroid cell, wherein the erythroid cell presents, e.g. comprises on the cell surface, at least one exogenous antigenic polypeptide, wherein the exogenous antigenic polypeptide is ALNFPGSQK (SEQ ID NO: 320), wherein the erythroid cell further presents, e.g. comprises on the cell surface, an exogenous polypeptide comprising a costimulatory polypeptide. In some embodiments, the costimulatory polypeptide is 4-1BBL. Also encompassed by the disclosure is an artificial antigen presenting cell (aAPC) comprising an erythroid cell, wherein the erythroid cell presents, e.g. comprises on the cell surface, at least one exogenous antigenic polypeptide, wherein the exogenous antigenic polypeptide is ALNFPGSQK (SEQ ID NO: 320), wherein the erythroid cell further presents, e.g. comprises on the cell surface, an exogenous polypeptide comprising a costimulatory polypeptide. In some embodiments, the costimulatory polypeptide is 4-1BBL. Also encompassed by the disclosure is an artificial antigen presenting cell (aAPC) comprising an erythroid cell, wherein the erythroid cell presents, e.g. comprises on the cell surface, at least one exogenous antigenic polypeptide, wherein the exogenous antigenic polypeptide is VYFFLPDHL (SEQ ID NO: 321), wherein the erythroid cell further presents, e.g. comprises on the cell surface, an exogenous polypeptide comprising a costimulatory polypeptide. In some embodiments, the costimulatory polypeptide is 4-1BBL. Also encompassed by the disclosure is an artificial antigen presenting cell (aAPC) comprising an erythroid cell, wherein the erythroid cell presents, e.g. comprises on the cell surface, at least one exogenous antigenic polypeptide, wherein the exogenous antigenic polypeptide is RTKQLYPEW (SEQ ID NO: 322), wherein the erythroid cell further presents, e.g. comprises on the cell surface, an exogenous polypeptide comprising a costimulatory polypeptide. In some embodiments, the costimulatory polypeptide is 4-1BBL. Also encompassed by the disclosure is an artificial antigen presenting cell (aAPC) comprising an erythroid cell, wherein the erythroid cell presents, e.g. comprises on the cell surface, at least one exogenous antigenic polypeptide, wherein the exogenous antigenic polypeptide is HTMEVTVYHR (SEQ ID NO: 323), wherein the erythroid cell further presents, e.g. comprises on the cell surface, an exogenous polypeptide comprising a costimulatory polypeptide. In some embodiments, the costimulatory polypeptide is 4-1BBL. Also encompassed by the disclosure is an artificial antigen presenting cell (aAPC) comprising an erythroid cell, wherein the erythroid cell presents, e.g. comprises on the cell surface, at least one exogenous antigenic polypeptide, wherein the exogenous antigenic polypeptide is SSPGCQPPA (SEQ ID NO: 324), wherein the erythroid cell further presents, e.g. comprises on the cell surface, an exogenous polypeptide comprising a costimulatory polypeptide. In some embodiments, the costimulatory polypeptide is 4-1BBL. Also encompassed by the disclosure is an artificial antigen presenting cell (aAPC) comprising an erythroid cell, wherein the erythroid cell presents, e.g. comprises on the cell surface, at least one exogenous antigenic polypeptide, wherein the exogenous antigenic polypeptide is VPLDCVLYRY (SEQ ID NO: 325), wherein the erythroid cell further presents, e.g. comprises on the cell surface, an exogenous polypeptide comprising a costimulatory polypeptide. In some embodiments, the costimulatory polypeptide is 4-1BBL. Also encompassed by the disclosure is an artificial antigen presenting cell (aAPC) comprising an erythroid cell, wherein the erythroid cell presents, e.g. comprises on the cell surface, at least one exogenous antigenic polypeptide, wherein the exogenous antigenic polypeptide is LPHSSSHWL (SEQ ID NO: 326), wherein the erythroid cell further presents, e.g. comprises on the cell surface, an exogenous polypeptide comprising a costimulatory polypeptide. In some embodiments, the costimulatory polypeptide is 4-1BBL. Also encompassed by the disclosure is an artificial antigen presenting cell (aAPC) comprising an erythroid cell, wherein the erythroid cell presents, e.g. comprises on the cell surface, at least one exogenous antigenic polypeptide, wherein the exogenous antigenic polypeptide is SNDGPTLI (SEQ ID NO: 327), wherein the erythroid cell further presents, e.g. comprises on the cell surface, an exogenous polypeptide comprising a costimulatory polypeptide. In some embodiments, the costimulatory polypeptide is 4-1BBL. Also encompassed by the disclosure is an artificial antigen presenting cell (aAPC) comprising an erythroid cell, wherein the erythroid cell presents, e.g. comprises on the cell surface, at least one exogenous antigenic polypeptide, wherein the exogenous antigenic polypeptide is GRAMLGTHTMEVTVY (SEQ ID NO: 328), wherein the erythroid cell further presents, e.g. comprises on the cell surface, an exogenous polypeptide comprising a costimulatory polypeptide. In some embodiments, the costimulatory polypeptide is 4-1BBL. Also encompassed by the disclosure is an artificial antigen presenting cell (aAPC) comprising an erythroid cell, wherein the erythroid cell presents, e.g. comprises on the cell surface, at least one exogenous antigenic polypeptide, wherein the exogenous antigenic polypeptide is WNRQLYPEWTEAQRLD (SEQ ID NO: 329), wherein the erythroid cell further presents, e.g. comprises on the cell surface, an exogenous polypeptide comprising a costimulatory polypeptide. In some embodiments, the costimulatory polypeptide is 4-1BBL. Also encompassed by the disclosure is an artificial antigen presenting cell (aAPC) comprising an erythroid cell, wherein the erythroid cell presents, e.g. comprises on the cell surface, at least one exogenous antigenic polypeptide, wherein the exogenous antigenic polypeptide is TTEWVETTARELPIPEPE (SEQ ID NO: 330), wherein the erythroid cell further presents, e.g. comprises on the cell surface, an exogenous polypeptide comprising a costimulatory polypeptide. In some embodiments, the costimulatory polypeptide is 4-1BBL. Also encompassed by the disclosure is an artificial antigen presenting cell (aAPC) comprising an erythroid cell, wherein the erythroid cell presents, e.g. comprises on the cell surface, at least one exogenous antigenic polypeptide, wherein the exogenous antigenic polypeptide is TGRAMLGTHTMEVTVYH (SEQ ID NO: 331), wherein the erythroid cell further presents, e.g. comprises on the cell surface, an exogenous polypeptide comprising a costimulatory polypeptide. In some embodiments, the costimulatory polypeptide is 4-1BBL. Also encompassed by the disclosure is an artificial antigen presenting cell (aAPC) comprising an erythroid cell, wherein the erythroid cell presents, e.g. comprises on the cell surface, at least one exogenous antigenic polypeptide, wherein the exogenous antigenic polypeptide is GRAMLGTHTMEVTVY (SEQ ID NO: 328), wherein the erythroid cell further presents, e.g. comprises on the cell surface, an exogenous polypeptide comprising a costimulatory polypeptide. In some embodiments, the costimulatory polypeptide is 4-1BBL.

[0335] Also encompassed by the disclosure is an artificial antigen presenting cell (aAPC) comprising an erythroid cell, wherein the erythroid cell presents, e.g. comprises on the cell surface, at least one exogenous antigenic polypeptide, wherein the exogenous antigenic polypeptide is RLMKQDFSV (SEQ ID NO: 314), and an exogenous antigen-presenting polypeptide, wherein the exogenous antigenic polypeptide is specifically bound to the exogenous antigen-presenting polypeptide, wherein the exogenous antigen-presenting polypeptide is an MHC class I polypeptide or single chain fusion. Also encompassed by the disclosure is an artificial antigen presenting cell (aAPC) comprising an erythroid cell, wherein the erythroid cell presents, e.g. comprises on the cell surface, at least one exogenous antigenic polypeptide, wherein the exogenous antigenic polypeptide is RLPRIFCSC (SEQ ID NO: 315), and an exogenous antigen-presenting polypeptide, wherein the exogenous antigenic polypeptide is specifically bound to the exogenous antigen-presenting polypeptide, wherein the exogenous antigen-presenting polypeptide is an MHC class I polypeptide or single chain fusion. Also encompassed by the disclosure is an artificial antigen presenting cell (aAPC) comprising an erythroid cell, wherein the erythroid cell presents, e.g. comprises on the cell surface, at least one exogenous antigenic polypeptide, wherein the exogenous antigenic polypeptide is LIYRRRLMK (SEQ ID NO: 316), and an exogenous antigen-presenting polypeptide, wherein the exogenous antigenic polypeptide is specifically bound to the exogenous antigen-presenting polypeptide, wherein the exogenous antigen-presenting polypeptide is an MHC class I polypeptide or single chain fusion. Also encompassed by the disclosure is an artificial antigen presenting cell (aAPC) comprising an erythroid cell, wherein the erythroid cell presents, e.g. comprises on the cell surface, at least one exogenous antigenic polypeptide, wherein the exogenous antigenic polypeptide is ALLAVGATK (SEQ ID NO: 317), and an exogenous antigen-presenting polypeptide, wherein the exogenous antigenic polypeptide is specifically bound to the exogenous antigen-presenting polypeptide, wherein the exogenous antigen-presenting polypeptide is an MHC class I polypeptide or single chain fusion. Also encompassed by the disclosure is an artificial antigen presenting cell (aAPC) comprising an erythroid cell, wherein the erythroid cell presents, e.g. comprises on the cell surface, at least one exogenous antigenic polypeptide, wherein the exogenous antigenic polypeptide is IALNFPGSQK (SEQ ID NO: 318), and an exogenous antigen-presenting polypeptide, wherein the exogenous antigenic polypeptide is specifically bound to the exogenous antigen-presenting polypeptide, wherein the exogenous antigen-presenting polypeptide is an MHC class I polypeptide or single chain fusion. Also encompassed by the disclosure is an artificial antigen presenting cell (aAPC) comprising an erythroid cell, wherein the erythroid cell presents, e.g. comprises on the cell surface, at least one exogenous antigenic polypeptide, wherein the exogenous antigenic polypeptide is RSYVPLAHR (SEQ ID NO: 319), and an exogenous antigen-presenting polypeptide, wherein the exogenous antigenic polypeptide is specifically bound to the exogenous antigen-presenting polypeptide, wherein the exogenous antigen-presenting polypeptide is an MHC class I polypeptide or single chain fusion Also encompassed by the disclosure is an artificial antigen presenting cell (aAPC) comprising an erythroid cell, wherein the erythroid cell presents, e.g. comprises on the cell surface, at least one exogenous antigenic polypeptide, wherein the exogenous antigenic polypeptide is ALNFPGSQK (SEQ ID NO: 320), and an exogenous antigen-presenting polypeptide, wherein the exogenous antigenic polypeptide is specifically bound to the exogenous antigen-presenting polypeptide, wherein the exogenous antigen-presenting polypeptide is an MHC class I polypeptide or single chain fusion Also encompassed by the disclosure is an artificial antigen presenting cell (aAPC) comprising an erythroid cell, wherein the erythroid cell presents, e.g. comprises on the cell surface, at least one exogenous antigenic polypeptide, wherein the exogenous antigenic polypeptide is ALNFPGSQK (SEQ ID NO: 320), and an exogenous antigen-presenting polypeptide, wherein the exogenous antigenic polypeptide is specifically bound to the exogenous antigen-presenting polypeptide, wherein the exogenous antigen-presenting polypeptide is an MHC class I polypeptide or single chain fusion. Also encompassed by the disclosure is an artificial antigen presenting cell (aAPC) comprising an erythroid cell, wherein the erythroid cell presents, e.g. comprises on the cell surface, at least one exogenous antigenic polypeptide, wherein the exogenous antigenic polypeptide is VYFFLPDHL (SEQ ID NO: 321), and an exogenous antigen-presenting polypeptide, wherein the exogenous antigenic polypeptide is specifically bound to the exogenous antigen-presenting polypeptide, wherein the exogenous antigen-presenting polypeptide is an MHC class I polypeptide or single chain fusion. Also encompassed by the disclosure is an artificial antigen presenting cell (aAPC) comprising an erythroid cell, wherein the erythroid cell presents, e.g. comprises on the cell surface, at least one exogenous antigenic polypeptide, wherein the exogenous antigenic polypeptide is RTKQLYPEW (SEQ ID NO: 322), and an exogenous antigen-presenting polypeptide, wherein the exogenous antigenic polypeptide is specifically bound to the exogenous antigen-presenting polypeptide, wherein the exogenous antigen-presenting polypeptide is an MHC class I polypeptide or single chain fusion. Also encompassed by the disclosure is an artificial antigen presenting cell (aAPC) comprising an erythroid cell, wherein the erythroid cell presents, e.g. comprises on the cell surface, at least one exogenous antigenic polypeptide, wherein the exogenous antigenic polypeptide is HTMEVTVYHR (SEQ ID NO: 323), and an exogenous antigen-presenting polypeptide, wherein the exogenous antigenic polypeptide is specifically bound to the exogenous antigen-presenting polypeptide, wherein the exogenous antigen-presenting polypeptide is an MHC class I polypeptide or single chain fusion. Also encompassed by the disclosure is an artificial antigen presenting cell (aAPC) comprising an erythroid cell, wherein the erythroid cell presents, e.g. comprises on the cell surface, at least one exogenous antigenic polypeptide, wherein the exogenous antigenic polypeptide is SSPGCQPPA (SEQ ID NO: 324), and an exogenous antigen-presenting polypeptide, wherein the exogenous antigenic polypeptide is specifically bound to the exogenous antigen-presenting polypeptide, wherein the exogenous antigen-presenting polypeptide is an MHC class I polypeptide or single chain fusion. Also encompassed by the disclosure is an artificial antigen presenting cell (aAPC) comprising an erythroid cell, wherein the erythroid cell presents, e.g. comprises on the cell surface, at least one exogenous antigenic polypeptide, wherein the exogenous antigenic polypeptide is VPLDCVLYRY (SEQ ID NO: 325), and an exogenous antigen-presenting polypeptide, wherein the exogenous antigenic polypeptide is specifically bound to the exogenous antigen-presenting polypeptide, wherein the exogenous antigen-presenting polypeptide is an MHC class I polypeptide or single chain fusion. Also encompassed by the disclosure is an artificial antigen presenting cell (aAPC) comprising an erythroid cell, wherein the erythroid cell presents, e.g. comprises on the cell surface, at least one exogenous antigenic polypeptide, wherein the exogenous antigenic polypeptide is LPHSSSHWL (SEQ ID NO: 326), and an exogenous antigen-presenting polypeptide, wherein the exogenous antigenic polypeptide is specifically bound to the exogenous antigen-presenting polypeptide, wherein the exogenous antigen-presenting polypeptide is an MHC class I polypeptide or single chain fusion. Also encompassed by the disclosure is an artificial antigen presenting cell (aAPC) comprising an erythroid cell, wherein the erythroid cell presents, e.g. comprises on the cell surface, at least one exogenous antigenic polypeptide, wherein the exogenous antigenic polypeptide is SNDGPTLI (SEQ ID NO: 327), and an exogenous antigen-presenting polypeptide, wherein the exogenous antigenic polypeptide is specifically bound to the exogenous antigen-presenting polypeptide, wherein the exogenous antigen-presenting polypeptide is an MHC class I polypeptide or single chain fusion. Also encompassed by the disclosure is an artificial antigen presenting cell (aAPC) comprising an erythroid cell, wherein the erythroid cell presents, e.g. comprises on the cell surface, at least one exogenous antigenic polypeptide, wherein the exogenous antigenic polypeptide is GRAMLGTHTMEVTVY (SEQ ID NO: 328), and an exogenous antigen-presenting polypeptide, wherein the exogenous antigenic polypeptide is specifically bound to the exogenous antigen-presenting polypeptide, wherein the exogenous antigen-presenting polypeptide is an MHC class I polypeptide or single chain fusion. Also encompassed by the disclosure is an artificial antigen presenting cell (aAPC) comprising an erythroid cell, wherein the erythroid cell presents, e.g. comprises on the cell surface, at least one exogenous antigenic polypeptide, wherein the exogenous antigenic polypeptide is WNRQLYPEWTEAQRLD (SEQ ID NO: 329), and an exogenous antigen-presenting polypeptide, wherein the exogenous antigenic polypeptide is specifically bound to the exogenous antigen-presenting polypeptide, wherein the exogenous antigen-presenting polypeptide is an MHC class I polypeptide or single chain fusion. Also encompassed by the disclosure is an artificial antigen presenting cell (aAPC) comprising an erythroid cell, wherein the erythroid cell presents, e.g. comprises on the cell surface, at least one exogenous antigenic polypeptide, wherein the exogenous antigenic polypeptide is TTEWVETTARELPIPEPE (SEQ ID NO: 330), and an exogenous antigen-presenting polypeptide, wherein the exogenous antigenic polypeptide is specifically bound to the exogenous antigen-presenting polypeptide, wherein the exogenous antigen-presenting polypeptide is an MHC class I polypeptide or single chain fusion. Also encompassed by the disclosure is an artificial antigen presenting cell (aAPC) comprising an erythroid cell, wherein the erythroid cell presents, e.g. comprises on the cell surface, at least one exogenous antigenic polypeptide, wherein the exogenous antigenic polypeptide is TGRAMLGTHTMEVTVYH (SEQ ID NO: 331), and an exogenous antigen-presenting polypeptide, wherein the exogenous antigenic polypeptide is specifically bound to the exogenous antigen-presenting polypeptide, wherein the exogenous antigen-presenting polypeptide is an MHC class I polypeptide or single chain fusion. Also encompassed by the disclosure is an artificial antigen presenting cell (aAPC) comprising an erythroid cell, wherein the erythroid cell presents, e.g. comprises on the cell surface, at least one exogenous antigenic polypeptide, wherein the exogenous antigenic polypeptide is GRAMLGTHTMEVTVY (SEQ ID NO: 328), and an exogenous antigen-presenting polypeptide, wherein the exogenous antigenic polypeptide is specifically bound to the exogenous antigen-presenting polypeptide, wherein the exogenous antigen-presenting polypeptide is an MHC class I polypeptide or single chain fusion.

[0336] Also encompassed by the disclosure is an artificial antigen presenting cell (aAPC) comprising an erythroid cell, wherein the erythroid cell presents, e.g. comprises on the cell surface, at least one exogenous antigenic polypeptide, wherein the exogenous antigenic polypeptide is RLMKQDFSV (SEQ ID NO: 314), and an exogenous antigen-presenting polypeptide, wherein the exogenous antigen-presenting polypeptide is an MHC class I polypeptide or single chain fusion, wherein the erythroid cell further presents, e.g. comprises on the cell surface, an exogenous polypeptide comprising a costimulatory polypeptide. In some embodiments, the costimulatory polypeptide is 4-1BBL. Also encompassed by the disclosure is an artificial antigen presenting cell (aAPC) comprising an erythroid cell, wherein the erythroid cell presents, e.g. comprises on the cell surface, at least one exogenous antigenic polypeptide, wherein the exogenous antigenic polypeptide is RLPRIFCSC (SEQ ID NO: 315), and an exogenous antigen-presenting polypeptide, wherein the exogenous antigenic polypeptide is specifically bound to the exogenous antigen-presenting polypeptide, wherein the exogenous antigen-presenting polypeptide is an MHC class I polypeptide or single chain fusion, wherein the erythroid cell further presents, e.g. comprises on the cell surface, an exogenous polypeptide comprising a costimulatory polypeptide. In some embodiments, the costimulatory polypeptide is 4-1BBL. Also encompassed by the disclosure is an artificial antigen presenting cell (aAPC) comprising an erythroid cell, wherein the erythroid cell presents, e.g. comprises on the cell surface, at least one exogenous antigenic polypeptide, wherein the exogenous antigenic polypeptide is LIYRRRLMK (SEQ ID NO: 316), and an exogenous antigen-presenting polypeptide, wherein the exogenous antigenic polypeptide is specifically bound to the exogenous antigen-presenting polypeptide, wherein the exogenous antigen-presenting polypeptide is an MHC class I polypeptide or single chain fusion, wherein the erythroid cell further presents, e.g. comprises on the cell surface, an exogenous polypeptide comprising a costimulatory polypeptide. In some embodiments, the costimulatory polypeptide is 4-1BBL. Also encompassed by the disclosure is an artificial antigen presenting cell (aAPC) comprising an erythroid cell, wherein the erythroid cell presents, e.g. comprises on the cell surface, at least one exogenous antigenic polypeptide, wherein the exogenous antigenic polypeptide is ALLAVGATK (SEQ ID NO: 317), and an exogenous antigen-presenting polypeptide, wherein the exogenous antigenic polypeptide is specifically bound to the exogenous antigen-presenting polypeptide, wherein the exogenous antigen-presenting polypeptide is an MHC class I polypeptide or single chain fusion, wherein the erythroid cell further presents, e.g. comprises on the cell surface, an exogenous polypeptide comprising a costimulatory polypeptide. In some embodiments, the costimulatory polypeptide is 4-1BBL. Also encompassed by the disclosure is an artificial antigen presenting cell (aAPC) comprising an erythroid cell, wherein the erythroid cell presents, e.g. comprises on the cell surface, at least one exogenous antigenic polypeptide, wherein the exogenous antigenic polypeptide is IALNFPGSQK (SEQ ID NO: 318), and an exogenous antigen-presenting polypeptide, wherein the exogenous antigenic polypeptide is specifically bound to the exogenous antigen-presenting polypeptide, wherein the exogenous antigen-presenting polypeptide is an MHC class I polypeptide or single chain fusion, wherein the erythroid cell further presents, e.g. comprises on the cell surface, an exogenous polypeptide comprising a costimulatory polypeptide. In some embodiments, the costimulatory polypeptide is 4-1BBL. Also encompassed by the disclosure is an artificial antigen presenting cell (aAPC) comprising an erythroid cell, wherein the erythroid cell presents, e.g. comprises on the cell surface, at least one exogenous antigenic polypeptide, wherein the exogenous antigenic polypeptide is RSYVPLAHR (SEQ ID NO: 319), and an exogenous antigen-presenting polypeptide, wherein the exogenous antigenic polypeptide is specifically bound to the exogenous antigen-presenting polypeptide, wherein the exogenous antigen-presenting polypeptide is an MHC class I polypeptide or single chain fusion, wherein the erythroid cell further presents, e.g. comprises on the cell surface, an exogenous polypeptide comprising a costimulatory polypeptide. In some embodiments, the costimulatory polypeptide is 4-1BBL. Also encompassed by the disclosure is an artificial antigen presenting cell (aAPC) comprising an erythroid cell, wherein the erythroid cell presents, e.g. comprises on the cell surface, at least one exogenous antigenic polypeptide, wherein the exogenous antigenic polypeptide is ALNFPGSQK (SEQ ID NO: 320), and an exogenous antigen-presenting polypeptide, wherein the exogenous antigenic polypeptide is specifically bound to the exogenous antigen-presenting polypeptide, wherein the exogenous antigen-presenting polypeptide is an MHC class I polypeptide or single chain fusion, wherein the erythroid cell further presents, e.g. comprises on the cell surface, an exogenous polypeptide comprising a costimulatory polypeptide. In some embodiments, the costimulatory polypeptide is 4-1BBL. Also encompassed by the disclosure is an artificial antigen presenting cell (aAPC) comprising an erythroid cell, wherein the erythroid cell presents, e.g. comprises on the cell surface, at least one exogenous antigenic polypeptide, wherein the exogenous antigenic polypeptide is ALNFPGSQK (SEQ ID NO: 320), and an exogenous antigen-presenting polypeptide, wherein the exogenous antigenic polypeptide is specifically bound to the exogenous antigen-presenting polypeptide, wherein the exogenous antigen-presenting polypeptide is an MHC class I polypeptide or single chain fusion, wherein the erythroid cell further presents, e.g. comprises on the cell surface, an exogenous polypeptide comprising a costimulatory polypeptide. In some embodiments, the costimulatory polypeptide is 4-1BBL. Also encompassed by the disclosure is an artificial antigen presenting cell (aAPC) comprising an erythroid cell, wherein the erythroid cell presents, e.g. comprises on the cell surface, at least one exogenous antigenic polypeptide, wherein the exogenous antigenic polypeptide is VYFFLPDHL (SEQ ID NO: 321), and an exogenous antigen-presenting polypeptide, wherein the exogenous antigenic polypeptide is specifically bound to the exogenous antigen-presenting polypeptide, wherein the exogenous antigen-presenting polypeptide is an MHC class I polypeptide or single chain fusion, wherein the erythroid cell further presents, e.g. comprises on the cell surface, an exogenous polypeptide comprising a costimulatory polypeptide. In some embodiments, the costimulatory polypeptide is 4-1BBL. Also encompassed by the disclosure is an artificial antigen presenting cell (aAPC) comprising an erythroid cell, wherein the erythroid cell presents, e.g. comprises on the cell surface, at least one exogenous antigenic polypeptide, wherein the exogenous antigenic polypeptide is RTKQLYPEW (SEQ ID NO: 322), and an exogenous antigen-presenting polypeptide, wherein the exogenous antigenic polypeptide is specifically bound to the exogenous antigen-presenting polypeptide, wherein the exogenous antigen-presenting polypeptide is an MHC class I polypeptide or single chain fusion, wherein the erythroid cell further presents, e.g. comprises on the cell surface, an exogenous polypeptide comprising a costimulatory polypeptide. In some embodiments, the costimulatory polypeptide is 4-1BBL. Also encompassed by the disclosure is an artificial antigen presenting cell (aAPC) comprising an erythroid cell, wherein the erythroid cell presents, e.g. comprises on the cell surface, at least one exogenous antigenic polypeptide, wherein the exogenous antigenic polypeptide is HTMEVTVYHR (SEQ ID NO: 323), and an exogenous antigen-presenting polypeptide, wherein the exogenous antigenic polypeptide is specifically bound to the exogenous antigen-presenting polypeptide, wherein the exogenous antigen-presenting polypeptide is an MHC class I polypeptide or single chain fusion, wherein the erythroid cell further presents, e.g. comprises on the cell surface, an exogenous polypeptide comprising a costimulatory polypeptide. In some embodiments, the costimulatory polypeptide is 4-1BBL. Also encompassed by the disclosure is an artificial antigen presenting cell (aAPC) comprising an erythroid cell, wherein the erythroid cell presents, e.g. comprises on the cell surface, at least one exogenous antigenic polypeptide, wherein the exogenous antigenic polypeptide is SSPGCQPPA (SEQ ID NO: 324), and an exogenous antigen-presenting polypeptide, wherein the exogenous antigenic polypeptide is specifically bound to the exogenous antigen-presenting polypeptide, wherein the exogenous antigen-presenting polypeptide is an MHC class I polypeptide or single chain fusion, wherein the erythroid cell further presents, e.g. comprises on the cell surface, an exogenous polypeptide comprising a costimulatory polypeptide. In some embodiments, the costimulatory polypeptide is 4-1BBL. Also encompassed by the disclosure is an artificial antigen presenting cell (aAPC) comprising an erythroid cell, wherein the erythroid cell presents, e.g. comprises on the cell surface, at least one exogenous antigenic polypeptide, wherein the exogenous antigenic polypeptide is VPLDCVLYRY (SEQ ID NO: 325), and an exogenous antigen-presenting polypeptide, wherein the exogenous antigenic polypeptide is specifically bound to the exogenous antigen-presenting polypeptide, wherein the exogenous antigen-presenting polypeptide is an MHC class I polypeptide or single chain fusion, wherein the erythroid cell further presents, e.g. comprises on the cell surface, an exogenous polypeptide comprising a costimulatory polypeptide. In some embodiments, the costimulatory polypeptide is 4-1BBL. Also encompassed by the disclosure is an artificial antigen presenting cell (aAPC) comprising an erythroid cell, wherein the erythroid cell presents, e.g. comprises on the cell surface, at least one exogenous antigenic polypeptide, wherein the exogenous antigenic polypeptide is LPHSSSHWL (SEQ ID NO: 326), and an exogenous antigen-presenting polypeptide, wherein the exogenous antigenic polypeptide is specifically bound to the exogenous antigen-presenting polypeptide, wherein the exogenous antigen-presenting polypeptide is an MHC class I polypeptide or single chain fusion, wherein the erythroid cell further presents, e.g. comprises on the cell surface, an exogenous polypeptide comprising a costimulatory polypeptide. In some embodiments, the costimulatory polypeptide is 4-1BBL. Also encompassed by the disclosure is an artificial antigen presenting cell (aAPC) comprising an erythroid cell, wherein the erythroid cell presents, e.g. comprises on the cell surface, at least one exogenous antigenic polypeptide, wherein the exogenous antigenic polypeptide is SNDGPTLI (SEQ ID NO: 327), and an exogenous antigen-presenting polypeptide, wherein the exogenous antigenic polypeptide is specifically bound to the exogenous antigen-presenting polypeptide, wherein the exogenous antigen-presenting polypeptide is an MHC class I polypeptide or single chain fusion, wherein the erythroid cell further presents, e.g. comprises on the cell surface, an exogenous polypeptide comprising a costimulatory polypeptide. In some embodiments, the costimulatory polypeptide is 4-1BBL. Also encompassed by the disclosure is an artificial antigen presenting cell (aAPC) comprising an erythroid cell, wherein the erythroid cell presents, e.g. comprises on the cell surface, at least one exogenous antigenic polypeptide, wherein the exogenous antigenic polypeptide is GRAMLGTHTMEVTVY (SEQ ID NO: 328), and an exogenous antigen-presenting polypeptide, wherein the exogenous antigenic polypeptide is specifically bound to the exogenous antigen-presenting polypeptide, wherein the exogenous antigen-presenting polypeptide is an MHC class I polypeptide or single chain fusion, wherein the erythroid cell further presents, e.g. comprises on the cell surface, an exogenous polypeptide comprising a costimulatory polypeptide. In some embodiments, the costimulatory polypeptide is 4-1BBL. Also encompassed by the disclosure is an artificial antigen presenting cell (aAPC) comprising an erythroid cell, wherein the erythroid cell presents, e.g. comprises on the cell surface, at least one exogenous antigenic polypeptide, wherein the exogenous antigenic polypeptide is WNRQLYPEWTEAQRLD (SEQ ID NO: 329), and an exogenous antigen-presenting polypeptide, wherein the exogenous antigenic polypeptide is specifically bound to the exogenous antigen-presenting polypeptide, wherein the exogenous antigen-presenting polypeptide is an MHC class I polypeptide or single chain fusion, wherein the erythroid cell further presents, e.g. comprises on the cell surface, an exogenous polypeptide comprising a costimulatory polypeptide. In some embodiments, the costimulatory polypeptide is 4-1BBL. Also encompassed by the disclosure is an artificial antigen presenting cell (aAPC) comprising an erythroid cell, wherein the erythroid cell presents, e.g. comprises on the cell surface, at least one exogenous antigenic polypeptide, wherein the exogenous antigenic polypeptide is TTEWVETTARELPIPEPE (SEQ ID NO: 330), and an exogenous antigen-presenting polypeptide, wherein the exogenous antigenic polypeptide is specifically bound to the exogenous antigen-presenting polypeptide, wherein the exogenous antigen-presenting polypeptide is an MHC class I polypeptide or single chain fusion, wherein the erythroid cell further presents, e.g. comprises on the cell surface, an exogenous polypeptide comprising a costimulatory polypeptide. In some embodiments, the costimulatory polypeptide is 4-1BBL. Also encompassed by the disclosure is an artificial antigen presenting cell (aAPC) comprising an erythroid cell, wherein the erythroid cell presents, e.g. comprises on the cell surface, at least one exogenous antigenic polypeptide, wherein the exogenous antigenic polypeptide is TGRAMLGTHTMEVTVYH (SEQ ID NO: 331), and an exogenous antigen-presenting polypeptide, wherein the exogenous antigenic polypeptide is specifically bound to the exogenous antigen-presenting polypeptide, wherein the exogenous antigen-presenting polypeptide is an MHC class I polypeptide or single chain fusion, wherein the erythroid cell further presents, e.g. comprises on the cell surface, an exogenous polypeptide comprising a costimulatory polypeptide. In some embodiments, the costimulatory polypeptide is 4-1BBL. Also encompassed by the disclosure is an artificial antigen presenting cell (aAPC) comprising an erythroid cell, wherein the erythroid cell presents, e.g. comprises on the cell surface, at least one exogenous antigenic polypeptide, wherein the exogenous antigenic polypeptide is GRAMLGTHTMEVTVY (SEQ ID NO: 328), and an exogenous antigen-presenting polypeptide, wherein the exogenous antigenic polypeptide is specifically bound to the exogenous antigen-presenting polypeptide, wherein the exogenous antigen-presenting polypeptide is an MHC class I polypeptide or single chain fusion, wherein the erythroid cell further presents, e.g. comprises on the cell surface, an exogenous polypeptide comprising a costimulatory polypeptide. In some embodiments, the costimulatory polypeptide is 4-1BBL.

[0337] An aAPC as described herein, presenting, e.g. comprising on the cell surface, a gp100 antigen, can be used in the treatment of cancer, as described in more detail below. An aAPC as described herein, presenting, e.g. comprising on the cell surface, a gp100 antigen, and further presenting, e.g. comprising on the cell surface, an exogenous polypeptide comprising a costimulatory polypeptide, can be used in the treatment of cancer, as described in more detail below. An aAPC as described herein, presenting, e.g. comprising on the cell surface, a gp100 antigen, and further presenting, e.g. comprising on the cell surface, an exogenous polypeptide comprising a costimulatory polypeptide, wherein the costimulatory polypeptide is 4-1BBL, can be used in the treatment of cancer, as described in more detail below. An aAPC as described herein, presenting, e.g. comprising on the cell surface, an exogenous antigen-presenting polypeptide and an exogenous antigenic polypeptide, wherein the exogenous antigenic polypeptide is specifically bound to the exogenous antigen-presenting polypeptide, wherein the exogenous antigen-presenting polypeptide is an MHC class I polypeptide or single chain fusion or an MHC class II polypeptide or single chain fusion, and wherein the exogenous antigenic polypeptide is a gp100 antigen, can be used in the treatment of cancer, as described in more detail below. An aAPC as described herein, presenting, e.g. comprising on the cell surface, an exogenous antigen-presenting polypeptide and an exogenous antigenic polypeptide, wherein the exogenous antigenic polypeptide is specifically bound to the exogenous antigen-presenting polypeptide, wherein the exogenous antigen-presenting polypeptide is an MHC class I polypeptide or single chain fusion or an MHC class II polypeptide or single chain fusion, and wherein the exogenous antigenic polypeptide is a gp100 antigen, and further presenting, e.g. comprising on the cell surface, an exogenous polypeptide comprising a costimulatory polypeptide, wherein the costimulatory polypeptide is 4-1BBL, can be used in the treatment of cancer, as described in more detail below. In certain embodiments, the cancer is melanoma.

### Epstein Barr Virus (EBV)

[0338] EBV is a human gamma herpesvirus with a tropism for B lymphocytes (Kieff and Liebowitz, in Virology, eds. Fields, B. N., Knipe, D. M. et al., p. 1889-1919, Raven Press, Ltd.: New York, 1990). EBV is an extremely common environmental agent infecting 80-100 percent of the individuals around the world. The initial or primary infection may be acute or sub-clinical. This is followed by a long period during which the EBV infection is latent in B lymphocytes present in the circulating blood, lymph nodes, and spleen.

[0339] In some embodiments, an artificial antigen presenting cell (aAPC) of the present disclosure comprises an erythroid cell, wherein the erythroid cell presents, e.g. comprises on the cell surface, at least one exogenous antigenic polypeptide, wherein the at least one exogenous antigenic polypeptide is an EBV antigen. In some embodiments, an artificial antigen presenting cell (aAPC) of the present disclosure comprises an erythroid cell, wherein the erythroid cell presents, e.g. comprises on the cell surface, at least one exogenous antigenic polypeptide, wherein the at least one exogenous antigenic polypeptide is an EBV antigen, and wherein the erythroid cell further presents, e.g. comprises on the cell surface, an exogenous polypeptide comprising a costimulatory polypeptide. In some embodiments, the costimulatory polypeptide is 4-1BBL. In some embodiments, the EBV antigen is human EBV antigen. In some embodiments, the erythroid cell is an enucleated cell. In some embodiments, the erythroid cell is a nucleated cell.

[0340] In another aspect, the disclosure features an artificial antigen presenting cell (aAPC) engineered to activate T cells, wherein the aAPC comprises an erythroid cell, wherein the erythroid cell presents, e.g. comprises on the cell surface, an exogenous antigen-presenting polypeptide and an exogenous antigenic polypeptide, wherein the exogenous antigenic polypeptide is specifically bound to the exogenous antigen-presenting polypeptide, wherein the exogenous antigen-presenting polypeptide is an MHC class I polypeptide or single chain fusion or an MHC class II polypeptide or single chain fusion, wherein the exogenous antigenic polypeptide is an EBV antigen. In another aspect, the disclosure features an artificial antigen presenting cell (aAPC) engineered to activate T cells, wherein the aAPC comprises an erythroid cell, wherein the erythroid cell presents, e.g. comprises on the cell surface, an exogenous antigen-presenting polypeptide and an exogenous antigenic polypeptide, wherein the exogenous antigenic polypeptide is specifically bound to the exogenous antigen-presenting polypeptide, wherein the exogenous antigen-presenting polypeptide is an MHC class I polypeptide or single chain fusion or an MHC class II polypeptide or single chain fusion, wherein the exogenous antigenic polypeptide is an EBV antigen, and wherein the erythroid cell further presents, e.g. comprises on the cell surface, an exogenous polypeptide comprising a costimulatory polypeptide. In some embodiments, the costimulatory polypeptide is 4-1BBL. In some embodiments, the EBV antigen is human EBV antigen. In some embodiments, the erythroid cell is an enucleated cell. In some embodiments, the erythroid cell is a nucleated cell.

[0341] Also encompassed by the disclosure is an artificial antigen presenting cell (aAPC) comprising an erythroid cell, wherein the erythroid cell presents, e.g. comprises on the cell surface, at least one exogenous antigenic polypeptide, wherein the exogenous antigenic polypeptide is a gp350 antigenic peptide. Also encompassed by the disclosure is an artificial antigen presenting cell (aAPC) comprising an erythroid cell, wherein the erythroid cell presents, e.g. comprises on the cell surface, at least one exogenous antigenic polypeptide, wherein the exogenous antigenic polypeptide is VLQWASLAV (SEQ ID NO: 698). Also encompassed by the disclosure is an artificial antigen presenting cell (aAPC) comprising an erythroid cell, wherein the erythroid cell presents, e.g. comprises on the cell surface, at least one exogenous antigenic polypeptide, wherein the exogenous antigenic polypeptide is an EBNA1 antigenic polypeptide. Also encompassed by the disclosure is an artificial antigen presenting cell (aAPC) comprising an erythroid cell, wherein the erythroid cell presents, e.g. comprises on the cell surface, at least one exogenous antigenic polypeptide, wherein the exogenous antigenic polypeptide is FMVFLQTHI (SEQ ID NO: 699). Also encompassed by the disclosure is an artificial antigen presenting cell (aAPC) comprising an erythroid cell, wherein the erythroid cell presents, e.g. comprises on the cell surface, at least one exogenous antigenic polypeptide, wherein the exogenous antigenic polypeptide is FLQTHIFAEV (SEQ ID NO: 700). Also encompassed by the disclosure is an artificial antigen presenting cell (aAPC) comprising an erythroid cell, wherein the erythroid cell presents, e.g. comprises on the cell surface, at least one exogenous antigenic polypeptide, wherein the exogenous antigenic polypeptide is SIVCYFMVFL (SEQ ID NO: 701). Also encompassed by the disclosure is an artificial antigen presenting cell (aAPC) comprising an erythroid cell, wherein the erythroid cell presents, e.g. comprises on the cell surface, at least one exogenous antigenic polypeptide, wherein the exogenous antigenic polypeptide is CLGGLLTMV (SEQ ID NO: 691). Also encompassed by the disclosure is an artificial antigen presenting cell (aAPC) comprising an erythroid cell, wherein the erythroid cell presents, e.g. comprises on the cell surface, at least one exogenous antigenic polypeptide, wherein the exogenous antigenic polypeptide is GLCTLVAML (SEQ ID NO: 692). Also encompassed by the disclosure is an artificial antigen presenting cell (aAPC) comprising an erythroid cell, wherein the erythroid cell presents, e.g. comprises on the cell surface, at least one exogenous antigenic polypeptide, wherein the exogenous antigenic polypeptide is FLYALALLL (SEQ ID NO: 693). Also encompassed by the disclosure is an artificial antigen presenting cell (aAPC) comprising an erythroid cell, wherein the erythroid cell presents, e.g. comprises on the cell surface, at least one exogenous antigenic polypeptide, wherein the exogenous antigenic polypeptide is YVLDHLIVV (SEQ ID NO: 694). Also encompassed by the disclosure is an artificial antigen presenting cell (aAPC) comprising an erythroid cell, wherein the erythroid cell presents, e.g. comprises on the cell surface, at least one exogenous antigenic polypeptide, wherein the exogenous antigenic polypeptide is RLRAEAQVK (SEQ ID NO: 695). Also encompassed by the disclosure is an artificial antigen presenting cell (aAPC) comprising an erythroid cell, wherein the erythroid cell presents, e.g. comprises on the cell surface, at least one exogenous antigenic polypeptide, wherein the exogenous antigenic polypeptide is AVFDRKSDAK (SEQ ID NO: 696). Also encompassed by the disclosure is an artificial antigen presenting cell (aAPC) comprising an erythroid cell, wherein the erythroid cell presents, e.g. comprises on the cell surface, at least one exogenous antigenic polypeptide, wherein the exogenous antigenic polypeptide is RPPIFIRLL (SEQ ID NO: 697).

[0342] Also encompassed by the disclosure is an artificial antigen presenting cell (aAPC) comprising an erythroid cell, wherein the erythroid cell presents, e.g. comprises on the cell surface, at least one exogenous antigenic polypeptide, wherein the exogenous antigenic polypeptide is a gp350 antigenic polypeptide, wherein the erythroid cell further presents, e.g. comprises on the cell surface, an exogenous polypeptide comprising a costimulatory polypeptide. In some embodiments, the costimulatory polypeptide is 4-1BBL. Also encompassed by the disclosure is an artificial antigen presenting cell (aAPC) comprising an erythroid cell, wherein the erythroid cell presents, e.g. comprises on the cell surface, at least one exogenous antigenic polypeptide, wherein the exogenous antigenic polypeptide is VLQWASLAV (SEQ ID NO: 698), wherein the erythroid cell further presents, e.g. comprises on the cell surface, an exogenous polypeptide comprising a costimulatory polypeptide. In some embodiments, the costimulatory polypeptide is 4-1BBL. Also encompassed by the disclosure is an artificial antigen presenting cell (aAPC) comprising an erythroid cell, wherein the erythroid cell presents, e.g. comprises on the cell surface, at least one exogenous antigenic polypeptide, wherein the exogenous antigenic polypeptide is an EBNA1 antigenic polypeptide, wherein the erythroid cell further presents, e.g. comprises on the cell surface, an exogenous polypeptide comprising a costimulatory polypeptide. In some embodiments, the costimulatory polypeptide is 4-1BBL. Also encompassed by the disclosure is an artificial antigen presenting cell (aAPC) comprising an erythroid cell, wherein the erythroid cell presents, e.g. comprises on the cell surface, at least one exogenous antigenic polypeptide, wherein the exogenous antigenic polypeptide is FMVFLQTHI (SEQ ID NO: 699), wherein the erythroid cell further presents, e.g. comprises on the cell surface, an exogenous polypeptide comprising a costimulatory polypeptide. In some embodiments, the costimulatory polypeptide is 4-1BBL. Also encompassed by the disclosure is an artificial antigen presenting cell (aAPC) comprising an erythroid cell, wherein the erythroid cell presents, e.g. comprises on the cell surface, at least one exogenous antigenic polypeptide, wherein the exogenous antigenic polypeptide is FLQTHIFAEV (SEQ ID NO: 700), wherein the erythroid cell further presents, e.g. comprises on the cell surface, an exogenous polypeptide comprising a costimulatory polypeptide. In some embodiments, the costimulatory polypeptide is 4-1BBL. Also encompassed by the disclosure is an artificial antigen presenting cell (aAPC) comprising an erythroid cell, wherein the erythroid cell presents, e.g. comprises on the cell surface, at least one exogenous antigenic polypeptide, wherein the exogenous antigenic polypeptide is SIVCYFMVFL (SEQ ID NO: 701), wherein the erythroid cell further presents, e.g. comprises on the cell surface, an exogenous polypeptide comprising a costimulatory polypeptide. In some embodiments, the costimulatory polypeptide is 4-1BBL. Also encompassed by the disclosure is an artificial antigen presenting cell (aAPC) comprising an erythroid cell, wherein the erythroid cell presents, e.g. comprises on the cell surface, at least one exogenous antigenic polypeptide, wherein the exogenous antigenic polypeptide is CLGGLLTMV (SEQ ID NO: 691), wherein the erythroid cell further presents, e.g. comprises on the cell surface, an exogenous polypeptide comprising a costimulatory polypeptide. In some embodiments, the costimulatory polypeptide is 4-1BBL. Also encompassed by the disclosure is an artificial antigen presenting cell (aAPC) comprising an erythroid cell, wherein the erythroid cell presents, e.g. comprises on the cell surface, at least one exogenous antigenic polypeptide, wherein the exogenous antigenic polypeptide is GLCTLVAML (SEQ ID NO: 692), wherein the erythroid cell further presents, e.g. comprises on the cell surface, an exogenous polypeptide comprising a costimulatory polypeptide. In some embodiments, the costimulatory polypeptide is 4-1BBL. Also encompassed by the disclosure is an artificial antigen presenting cell (aAPC) comprising an erythroid cell, wherein the erythroid cell presents, e.g. comprises on the cell surface, at least one exogenous antigenic polypeptide, wherein the exogenous antigenic polypeptide is FLYALALLL (SEQ ID NO: 693), wherein the erythroid cell further presents, e.g. comprises on the cell surface, an exogenous polypeptide comprising a costimulatory polypeptide. In some embodiments, the costimulatory polypeptide is 4-1BBL. Also encompassed by the disclosure is an artificial antigen presenting cell (aAPC) comprising an erythroid cell, wherein the erythroid cell presents, e.g. comprises on the cell surface, at least one exogenous antigenic polypeptide, wherein the exogenous antigenic polypeptide is YVLDHLIVV (SEQ ID NO: 694), wherein the erythroid cell further presents, e.g. comprises on the cell surface, an exogenous polypeptide comprising a costimulatory polypeptide. In some embodiments, the costimulatory polypeptide is 4-1BBL. Also encompassed by the disclosure is an artificial antigen presenting cell (aAPC) comprising an erythroid cell, wherein the erythroid cell presents, e.g. comprises on the cell surface, at least one exogenous antigenic polypeptide, wherein the exogenous antigenic polypeptide is RLRAEAQVK (SEQ ID NO: 695), wherein the erythroid cell further presents, e.g. comprises on the cell surface, an exogenous polypeptide comprising a costimulatory polypeptide. In some embodiments, the costimulatory polypeptide is 4-1BBL. Also encompassed by the disclosure is an artificial antigen presenting cell (aAPC) comprising an erythroid cell, wherein the erythroid cell presents, e.g. comprises on the cell surface, at least one exogenous antigenic polypeptide, wherein the exogenous antigenic polypeptide is AVFDRKSDAK (SEQ ID NO: 696), wherein the erythroid cell further presents, e.g. comprises on the cell surface, an exogenous polypeptide comprising a costimulatory polypeptide. In some embodiments, the costimulatory polypeptide is 4-1BBL. Also encompassed by the disclosure is an artificial antigen presenting cell (aAPC) comprising an erythroid cell, wherein the erythroid cell presents, e.g. comprises on the cell surface, at least one exogenous antigenic polypeptide, wherein the exogenous antigenic polypeptide is RPPIFIRLL (SEQ ID NO: 697), wherein the erythroid cell further presents, e.g. comprises on the cell surface, an exogenous polypeptide comprising a costimulatory polypeptide. In some embodiments, the costimulatory polypeptide is 4-1BBL.

[0343] Also encompassed by the disclosure is an artificial antigen presenting cell (aAPC) comprising an erythroid cell, wherein the erythroid cell presents, e.g. comprises on the cell surface, an exogenous antigen-presenting polypeptide and an exogenous antigenic polypeptide, wherein the exogenous antigen-presenting polypeptide is an MHC class I polypeptide or single chain fusion, and wherein the exogenous antigenic polypeptide is an gp350 antigenic polypeptide. In embodiments, the exogenous antigen-presenting polypeptide is an MHC Class I HLA-A2 polypeptide or single chain fusion. In some embodiments, the exogenous antigen-presenting polypeptide is an MHC Class I HLA-A2 single chain fusion. Also encompassed by the disclosure is an artificial antigen presenting cell (aAPC) comprising an erythroid cell, wherein the erythroid cell presents an exogenous antigen-presenting polypeptide and an exogenous antigenic polypeptide, wherein the exogenous antigenic polypeptide is specifically bound to the exogenous antigen-presenting polypeptide, wherein the exogenous antigen-presenting polypeptide is an MHC class I polypeptide or single chain fusion, and wherein the exogenous antigenic polypeptide is VLQWASLAV (SEQ ID NO: 698). In embodiments, the exogenous antigen-presenting polypeptide is an MHC Class I HLA-A2 polypeptide or single chain fusion. In some embodiments, the exogenous antigen-presenting polypeptide is an MHC Class I HLA-A2 single chain fusion. Also encompassed by the disclosure is an artificial antigen presenting cell (aAPC) comprising an erythroid cell, wherein the erythroid cell presents, e.g. comprises on the cell surface, an exogenous antigen-presenting polypeptide and an exogenous antigenic polypeptide, wherein the exogenous antigen-presenting polypeptide is an MHC class I polypeptide or single chain fusion, and wherein the exogenous antigenic polypeptide is an EBNA1 antigenic polypeptide. In embodiments, the exogenous antigen-presenting polypeptide is an MHC Class I HLA-A2 polypeptide or single chain fusion. In some embodiments, the exogenous antigen-presenting polypeptide is an MHC Class I HLA-A2 single chain fusion. Also encompassed by the disclosure is an artificial antigen presenting cell (aAPC) comprising an erythroid cell, wherein the erythroid cell presents, e.g. comprises on the cell surface, an exogenous antigen-presenting polypeptide and an exogenous antigenic polypeptide, wherein the exogenous antigenic polypeptide is specifically bound to the exogenous antigen-presenting polypeptide, wherein the exogenous antigen-presenting polypeptide is an MHC class I polypeptide or single chain fusion, and wherein the exogenous antigenic polypeptide is FMVFLQTHI (SEQ ID NO: 699). In embodiments, the exogenous antigen-presenting polypeptide is an MHC Class I HLA-A2 polypeptide or single chain fusion. In some embodiments, the exogenous antigen-presenting polypeptide is an MHC Class I HLA-A2 single chain fusion. Also encompassed by the disclosure is an artificial antigen presenting cell (aAPC) comprising an erythroid cell, wherein the erythroid cell presents, e.g. comprises on the cell surface, an exogenous antigen-presenting polypeptide and an exogenous antigenic polypeptide, wherein the exogenous antigenic polypeptide is specifically bound to the exogenous antigen-presenting polypeptide, wherein the exogenous antigen-presenting polypeptide is an MHC class I polypeptide or single chain fusion, and wherein the exogenous antigenic polypeptide is FLQTHIFAEV (SEQ ID NO: 700). In embodiments, the exogenous antigen-presenting polypeptide is an MHC Class I HLA-A2 polypeptide or single chain fusion. In some embodiments, the exogenous antigen-presenting polypeptide is an MHC Class I HLA-A2 single chain fusion. Also encompassed by the disclosure is an artificial antigen presenting cell (aAPC) comprising an erythroid cell, wherein the erythroid cell presents, e.g. comprises on the cell surface, an exogenous antigen-presenting polypeptide and an exogenous antigenic polypeptide, wherein the exogenous antigenic polypeptide is specifically bound to the exogenous antigen-presenting polypeptide, wherein the exogenous antigen-presenting polypeptide is an MHC class I polypeptide or single chain fusion, and wherein the exogenous antigenic polypeptide is SIVCYFMVFL (SEQ ID NO: 701). In embodiments, the exogenous antigen-presenting polypeptide is an MHC Class I HLA-A2 polypeptide or single chain fusion. In some embodiments, the exogenous antigen-presenting polypeptide is an MHC Class I HLA-A2 single chain fusion. Also encompassed by the disclosure is an artificial antigen presenting cell (aAPC) comprising an erythroid cell, wherein the erythroid cell presents, e.g. comprises on the cell surface, an exogenous antigen-presenting polypeptide and an exogenous antigenic polypeptide, wherein the exogenous antigen-presenting polypeptide is an MHC class I polypeptide or single chain fusion, and wherein the exogenous antigenic polypeptide is CLGGLLTMV (SEQ ID NO: 691). In embodiments, the exogenous antigen-presenting polypeptide is an MHC Class I HLA-A2 polypeptide or single chain fusion. In some embodiments, the exogenous antigen-presenting polypeptide is an MHC Class I HLA-A2 single chain fusion. Also encompassed by the disclosure is an artificial antigen presenting cell (aAPC) comprising an erythroid cell, wherein the erythroid cell presents, e.g. comprises on the cell surface, an exogenous antigen-presenting polypeptide and an exogenous antigenic polypeptide, wherein the exogenous antigenic polypeptide is specifically bound to the exogenous antigen-presenting polypeptide, wherein the exogenous antigen-presenting polypeptide is an MHC class I polypeptide or single chain fusion, and wherein the exogenous antigenic polypeptide is GLCTLVAML (SEQ ID NO: 692). In embodiments, the exogenous antigen-presenting polypeptide is an MHC Class I HLA-A2 polypeptide or single chain fusion. In some embodiments, the exogenous antigen-presenting polypeptide is an MHC Class I HLA-A2 single chain fusion. Also encompassed by the disclosure is an artificial antigen presenting cell (aAPC) comprising an erythroid cell, wherein the erythroid cell presents, e.g. comprises on the cell surface, an exogenous antigen-presenting polypeptide and an exogenous antigenic polypeptide, wherein the exogenous antigenic polypeptide is specifically bound to the exogenous antigen-presenting polypeptide, wherein the exogenous antigen-presenting polypeptide is an MHC class I polypeptide or single chain fusion, and wherein the exogenous antigenic polypeptide is FLYALALLL (SEQ ID NO: 693). In embodiments, the exogenous antigen-presenting polypeptide is an MHC Class I HLA-A2 polypeptide or single chain fusion. In some embodiments, the exogenous antigen-presenting polypeptide is an MHC Class I HLA-A2 single chain fusion. Also encompassed by the disclosure is an artificial antigen presenting cell (aAPC) comprising an erythroid cell, wherein the erythroid cell presents, e.g. comprises on the cell surface, an exogenous antigen-presenting polypeptide and an exogenous antigenic polypeptide, wherein the exogenous antigenic polypeptide is specifically bound to the exogenous antigen-presenting polypeptide, wherein the exogenous antigen-presenting polypeptide is an MHC class I polypeptide or single chain fusion, and wherein the exogenous antigenic polypeptide is YVLDHLIVV (SEQ ID NO: 694). In embodiments, the exogenous antigen-presenting polypeptide is an MHC Class I HLA-A2 polypeptide or single chain fusion. In some embodiments, the exogenous antigen-presenting polypeptide is an MHC Class I HLA-A2 single chain fusion. Also encompassed by the disclosure is an artificial antigen presenting cell (aAPC) comprising an erythroid cell, wherein the erythroid cell presents, e.g. comprises on the cell surface, an exogenous antigen-presenting polypeptide and an exogenous antigenic polypeptide, wherein the exogenous antigenic polypeptide is specifically bound to the exogenous antigen-presenting polypeptide, wherein the exogenous antigen-presenting polypeptide is an MHC class I polypeptide or single chain fusion, and wherein the exogenous antigenic polypeptide is RLRAEAQVK (SEQ ID NO: 695). In embodiments, the exogenous antigen-presenting polypeptide is an MHC Class I HLA-A3 polypeptide or single chain fusion. In some embodiments, the exogenous antigen-presenting polypeptide is an MHC Class I HLA-A3 single chain fusion. Also encompassed by the disclosure is an artificial antigen presenting cell (aAPC) comprising an erythroid cell, wherein the erythroid cell presents, e.g. comprises on the cell surface, an exogenous antigen-presenting polypeptide and an exogenous antigenic polypeptide, wherein the exogenous antigenic polypeptide is specifically bound to the exogenous antigen-presenting polypeptide, wherein the exogenous antigen-presenting polypeptide is an MHC class I polypeptide or single chain fusion, and wherein the exogenous antigenic polypeptide is AVFDRKSDAK (SEQ ID NO: 696). In embodiments, the exogenous antigen-presenting polypeptide is an MHC Class I HLA-A11 polypeptide or single chain fusion. In some embodiments, the exogenous antigen-presenting polypeptide is an MHC Class I HLA-A11 single chain fusion. Also encompassed by the disclosure is an artificial antigen presenting cell (aAPC) comprising an erythroid cell, wherein the erythroid cell presents, e.g. comprises on the cell surface, at least one exogenous antigenic polypeptide, wherein the erythroid cell presents, e.g. comprises on the cell surface, an exogenous antigen-presenting polypeptide and an exogenous antigenic polypeptide, wherein the exogenous antigenic polypeptide is specifically bound to the exogenous antigen-presenting polypeptide, wherein the exogenous antigen-presenting polypeptide is an MHC class I polypeptide or single chain fusion, and wherein the exogenous antigenic polypeptide is RPPIFIRLL (SEQ ID NO: 697). In embodiments, the exogenous antigen-presenting polypeptide is an MHC Class I HLA-B7 polypeptide or single chain fusion. In some embodiments, the exogenous antigen-presenting polypeptide is an MHC Class I HLA-B7 single chain fusion.

[0344] Also encompassed by the disclosure is an artificial antigen presenting cell (aAPC) comprising an erythroid cell, wherein the erythroid cell presents, e.g. comprises on the cell surface, an exogenous antigen-presenting polypeptide and an exogenous antigenic polypeptide, wherein the exogenous antigenic polypeptide is specifically bound to the exogenous antigen-presenting polypeptide, wherein the exogenous antigen-presenting polypeptide is an MHC class I polypeptide or single chain fusion, and wherein the exogenous antigenic polypeptide is a gp350 antigenic peptide, e.g., VLQWASLAV (SEQ ID NO: 698), wherein the erythroid cell further presents, e.g. comprises on the cell surface, an exogenous polypeptide comprising a costimulatory polypeptide. In some embodiments, the costimulatory polypeptide is 4-1BBL. In embodiments, the exogenous antigen-presenting polypeptide is an MHC Class I HLA-A2 polypeptide or single chain fusion. In some embodiments, the exogenous antigen-presenting polypeptide is an MHC Class I HLA-A2 single chain fusion.

[0345] Also encompassed by the disclosure is an artificial antigen presenting cell (aAPC) comprising an erythroid cell, wherein the erythroid cell presents, e.g. comprises on the cell surface, an exogenous antigen-presenting polypeptide and an exogenous antigenic polypeptide, wherein the exogenous antigen-presenting polypeptide is an MHC class I polypeptide or single chain fusion, and wherein the exogenous antigenic polypeptide is an EBNA1 antigenic peptide, e.g., FMVFLQTHI (SEQ ID NO: 699), FLQTHIFAEV (SEQ ID NO: 700), SIVCYFMVFL (SEQ ID NO: 701) or one of the EBV antigenic polypeptide listed in Table 1, wherein the erythroid cell further presents, e.g. comprises on the cell surface, an exogenous polypeptide comprising a costimulatory polypeptide. In some embodiments, the costimulatory polypeptide is 4-1BBL. In embodiments, the exogenous antigen-presenting polypeptide is an MHC Class I HLA-A2 polypeptide or single chain fusion. In some embodiments, the exogenous antigen-presenting polypeptide is an MHC Class I HLA-A2 single chain fusion.

[0346] An aAPC as described herein, presenting, e.g. comprising on the cell surface, an EBV antigen, can be used in the treatment of an autoimmune disease associated with an infectious agent. In certain embodiments, the exogenous antigenic polypeptides are presented on antigen-presenting polypeptides, e.g., the exogenous antigenic polypeptide is specifically bound to the exogenous antigen-presenting polypeptides, e.g. histocompatibility molecules (MHCI, MHCII). In some embodiments, the autoimmune disease associated with an infectious agent is multiple sclerosis (MS) as described in more detail below. An aAPC as described herein, presenting, e.g. comprising on the cell surface, an EBV antigen, and further presenting, e.g. comprising on the cell surface, an exogenous polypeptide comprising a costimulatory polypeptide, can be used in the treatment an autoimmune disease associated with an infectious agent. In some embodiments, the autoimmune disease associated with an infectious agent is multiple sclerosis (MS) as described in more detail below. An aAPC as described herein, presenting, e.g. comprising on the cell surface, an EBV antigen, and further presenting, e.g. comprising on the cell surface, an exogenous polypeptide comprising a costimulatory polypeptide, wherein the costimulatory polypeptide is 4-1BBL, can be used in the treatment of an autoimmune disease associated with an infectious agent. In some embodiments, the autoimmune disease associated with an infectious agent is multiple sclerosis (MS) as described in more detail below.

### Human Papilloma Virus (HPV)

[0347] Papillomaviruses are small DNA tumour viruses, which are highly species specific. So far, over 70 individual human papillomavirus (HPV) genotypes have been described. HPVs are generally specific either for the skin (e.g. HPV-1 and -2) or mucosal surfaces (e.g. HPV-6 and -11) and usually cause benign tumors (warts) that persist for several months or years. Some HPVs are also associated with cancers, such as HPV-positive head and neck and cervical cancers. The strongest positive association between an HPV and human cancer is that which exists between HPV-16 and HPV-18 and cervical carcinoma.

[0348] In some embodiments, an artificial antigen presenting cell (aAPC) of the present disclosure comprises an erythroid cell, wherein the erythroid cell presents, e.g. comprises on the cell surface, at least one exogenous antigenic polypeptide, wherein the at least one exogenous antigenic polypeptide is an HPV antigen. In some embodiments, an artificial antigen presenting cell (aAPC) of the present disclosure comprises an erythroid cell, wherein the erythroid cell presents, e.g. comprises on the cell surface, at least one exogenous antigenic polypeptide, wherein the at least one exogenous antigenic polypeptide is an HPV-E7 antigen. In some embodiments, an artificial antigen presenting cell (aAPC) of the present disclosure comprises an erythroid cell, wherein the erythroid cell presents, e.g. comprises on the cell surface, at least one exogenous antigenic polypeptide, wherein the at least one exogenous antigenic polypeptide is an HPV-E6 antigen. In some embodiments, an artificial antigen presenting cell (aAPC) of the present disclosure comprises an erythroid cell, wherein the erythroid cell presents, e.g. comprises on the cell surface, at least one exogenous antigenic polypeptide, wherein the at least one exogenous antigenic polypeptide is an HPV antigen, and wherein the erythroid cell further presents, e.g. comprises on the cell surface, an exogenous polypeptide comprising a costimulatory polypeptide. In some embodiments, the costimulatory polypeptide is 4-1BBL. In some embodiments, an artificial antigen presenting cell (aAPC) of the present disclosure comprises an erythroid cell, wherein the erythroid cell presents, e.g. comprises on the cell surface, at least one exogenous antigenic polypeptide, wherein the at least one exogenous antigenic polypeptide is an HPV-E7 antigen, and wherein the erythroid cell further presents, e.g. comprises on the cell surface, an exogenous polypeptide comprising a costimulatory polypeptide. In some embodiments, the costimulatory polypeptide is 4-1BBL. In some embodiments, the HPV antigen is human HPV antigen. In some embodiments, the erythroid cell is an enucleated cell. In some embodiments, the erythroid cell is a nucleated cell.

[0349] In another aspect, the disclosure features an artificial antigen presenting cell (aAPC) engineered to activate T cells, wherein the aAPC comprises an erythroid cell, wherein the erythroid cell presents, e.g. comprises on the cell surface, an exogenous antigen-presenting polypeptide and an exogenous antigenic polypeptide, wherein the exogenous antigenic polypeptide is specifically bound to the exogenous antigen-presenting polypeptide, wherein the exogenous antigen-presenting polypeptide is an MHC class I polypeptide or single chain fusion or an MHC class II polypeptide or single chain fusion, wherein the exogenous antigenic polypeptide is an HPV antigen. In another aspect, the disclosure features an artificial antigen presenting cell (aAPC) engineered to activate T cells, wherein the aAPC comprises an erythroid cell, wherein the erythroid cell presents, e.g. comprises on the cell surface, an exogenous antigen-presenting polypeptide and an exogenous antigenic polypeptide, wherein the exogenous antigenic polypeptide is specifically bound to the exogenous antigen-presenting polypeptide, wherein the exogenous antigen-presenting polypeptide is an MHC class I polypeptide or single chain fusion or an MHC class II polypeptide or single chain fusion, wherein the exogenous antigenic polypeptide is an HPV-E7 antigen. In another aspect, the disclosure features an artificial antigen presenting cell (aAPC) engineered to activate T cells, wherein the aAPC comprises an erythroid cell, wherein the erythroid cell presents, e.g. comprises on the cell surface, an exogenous antigen-presenting polypeptide and an exogenous antigenic polypeptide, wherein the exogenous antigenic polypeptide is specifically bound to the exogenous antigen-presenting polypeptide, wherein the exogenous antigen-presenting polypeptide is an MHC class I polypeptide or single chain fusion or an MHC class II polypeptide or single chain fusion, wherein the exogenous antigenic polypeptide is an HPV antigen, and wherein the erythroid cell further presents, e.g. comprises on the cell surface, an exogenous polypeptide comprising a costimulatory polypeptide. In another aspect, the disclosure features an artificial antigen presenting cell (aAPC) engineered to activate T cells, wherein the aAPC comprises an erythroid cell, wherein the erythroid cell presents, e.g. comprises on the cell surface, an exogenous antigen-presenting polypeptide and an exogenous antigenic polypeptide, wherein the exogenous antigenic polypeptide is specifically bound to the exogenous antigen-presenting polypeptide, wherein the exogenous antigen-presenting polypeptide is an MHC class I polypeptide or single chain fusion or an MHC class II polypeptide or single chain fusion, wherein the exogenous antigenic polypeptide is an HPV-E7 antigen, and wherein the erythroid cell further presents, e.g. comprises on the cell surface, an exogenous polypeptide comprising a costimulatory polypeptide. In some embodiments, the costimulatory polypeptide is 4-1BBL. In some embodiments, the HPV antigen is human HPV antigen. In some embodiments, the erythroid cell is an enucleated cell. In some embodiments, the erythroid cell is a nucleated cell.

[0350] Also encompassed by the disclosure is an artificial antigen presenting cell (aAPC) comprising an erythroid cell, wherein the erythroid cell presents, e.g. comprises on the cell surface, at least one exogenous antigenic polypeptide, wherein the exogenous antigenic polypeptide is YMLDLQPET (SEQ ID NO: 713), YMLDLQPETT (SEQ ID NO: 714), or TIHDIILECV (SEQ ID NO: 712). In some embodiments, the exogenous antigenic polypeptide is YMLDLQPET (SEQ ID NO: 713).

[0351] Also encompassed by the disclosure is an artificial antigen presenting cell (aAPC) comprising an erythroid cell, wherein the erythroid cell presents, e.g. comprises on the cell surface, at least one exogenous antigenic polypeptide, wherein the exogenous antigenic polypeptide is YMLDLQPET (SEQ ID NO: 713), YMLDLQPETT (SEQ ID NO: 714), or TIHDIILECV (SEQ ID NO: 712), wherein the erythroid cell further presents, e.g. comprises on the cell surface, an exogenous polypeptide comprising a costimulatory polypeptide. In some embodiments, the exogenous antigenic polypeptide is YMLDLQPET (SEQ ID NO: 713). In some embodiments, the costimulatory polypeptide is 4-1BBL.

[0352] Also encompassed by the disclosure is an artificial antigen presenting cell (aAPC) comprising an erythroid cell, wherein the erythroid cell presents, e.g. comprises on the cell surface, an exogenous antigen-presenting polypeptide and an exogenous antigenic polypeptide, wherein the exogenous antigenic polypeptide is specifically bound to the exogenous antigen-presenting polypeptide, wherein the exogenous antigen-presenting polypeptide is an MHC class I polypeptide or single chain fusion, and wherein the exogenous antigenic polypeptide is HPV-E7. Also encompassed by the disclosure is an artificial antigen presenting cell (aAPC) comprising an erythroid cell, wherein the erythroid cell presents, e.g. comprises on the cell surface, an exogenous antigen-presenting polypeptide and an exogenous antigenic polypeptide, wherein the exogenous antigenic polypeptide is specifically bound to the exogenous antigen-presenting polypeptide, wherein the exogenous antigen-presenting polypeptide is an MHC class I polypeptide or single chain fusion, and wherein the exogenous antigenic polypeptide is YMLDLQPET (SEQ ID NO: 713), YMLDLQPETT (SEQ ID NO: 714), or TIHDIILECV (SEQ ID NO: 712). In some embodiments, the exogenous antigenic polypeptide is YMLDLQPET (SEQ ID NO: 713). In embodiments, the exogenous antigen-presenting polypeptide is an MHC Class I HLA-A2 polypeptide or single chain fusion. In some embodiments, the exogenous antigen-presenting polypeptide is an MHC Class I HLA-A2 single chain fusion.

[0353] Also encompassed by the disclosure is an artificial antigen presenting cell (aAPC) comprising an erythroid cell, wherein the erythroid cell presents, e.g. comprises on the cell surface, an exogenous antigen-presenting polypeptide and an exogenous antigenic polypeptide, wherein the exogenous antigenic polypeptide is specifically bound to the exogenous antigen-presenting polypeptide, wherein the exogenous antigen-presenting polypeptide is an MHC class I polypeptide or single chain fusion, and wherein the exogenous antigenic polypeptide is HPV-E7, wherein the erythroid cell further presents, e.g. comprises on the cell surface, an exogenous polypeptide comprising a costimulatory polypeptide. In some embodiments, the costimulatory polypeptide is 4-1BBL. Also encompassed by the disclosure is an artificial antigen presenting cell (aAPC) comprising an erythroid cell, wherein the erythroid cell presents, e.g. comprises on the cell surface, an exogenous antigen-presenting polypeptide and an exogenous antigenic polypeptide, wherein the exogenous antigenic polypeptide is specifically bound to the exogenous antigen-presenting polypeptide, wherein the exogenous antigen-presenting polypeptide is an MHC class I polypeptide or single chain fusion, and wherein the exogenous antigenic polypeptide is YMLDLQPET (SEQ ID NO: 713), YMLDLQPETT (SEQ ID NO: 714), or TIHDIILECV (SEQ ID NO: 712), wherein the erythroid cell further presents, e.g. comprises on the cell surface, an exogenous polypeptide comprising a costimulatory polypeptide. In some embodiments, the exogenous antigenic polypeptide is YMLDLQPET (SEQ ID NO: 713). In some embodiments, the costimulatory polypeptide is 4-1BBL. In embodiments, the exogenous antigen-presenting polypeptide is an MHC Class I HLA-A2 polypeptide or single chain fusion. In some embodiments, the exogenous antigen-presenting polypeptide is an MHC Class I HLA-A2 single chain fusion.

[0354] In one particular embodiment, an artificial antigen presenting cell comprises an erythroid cell, wherein the erythroid cell presents, e.g. comprises on the cell surface, at least one exogenous antigenic polypeptide, wherein the exogenous antigenic polypeptide is a HPV antigen, fused to an exogenous antigen presenting polypeptide, MHC Class I HLA-A2, fused to the GPA transmembrane domain (GPA). In some embodiments, the HPV antigen is human HPV antigen. In one particular embodiment, an artificial antigen presenting cell comprises an erythroid cell, wherein the erythroid cell presents, e.g. comprises on the cell surface, at least one exogenous antigenic polypeptide, wherein the exogenous antigenic polypeptide is HPV-E7, fused to an exogenous antigen presenting polypeptide, MHC Class I HLA-A2, fused to the GPA transmembrane domain (GPA). In one particular embodiment, an artificial antigen presenting cell comprises an erythroid cell, wherein the erythroid cell presents, e.g. comprises on the cell surface, at least one exogenous antigenic polypeptide, wherein the exogenous antigenic polypeptide is TIHDIILECV (SEQ ID NO: 712), fused to an exogenous antigen presenting polypeptide, MHC Class I HLA-A2, fused to the GPA transmembrane domain (GPA).

[0355] An aAPC as described herein, presenting an HPV antigen, can be used in the treatment of a cancer associated with an oncogenic virus (e.g. HPV). An aAPC as described herein, presenting an HPV antigen, and further presenting an exogenous polypeptide comprising a costimulatory polypeptide, can be used in the treatment a cancer associated with an oncogenic virus (e.g. HPV). An aAPC as described herein, presenting an HPV antigen, and further presenting an exogenous polypeptide comprising a costimulatory polypeptide, wherein the costimulatory polypeptide is 4-1BBL, can be used in the treatment of a cancer associated with an oncogenic virus (e.g. HPV), as described in more detail below. In embodiments, the HPV associated cancer is HPV-positive head and neck cancer. In some embodiments, the HPV associated cancer is HPV-positive cervical cancer.

[0356] In some embodiments, an artificial antigen presenting cell (aAPC) of the present disclosure comprises an erythroid cell, wherein the erythroid cell presents, e.g. comprises on the cell surface, at least one exogenous antigenic polypeptide, wherein the at least one exogenous antigenic polypeptide is CD33.

[0357] In some embodiments, an artificial antigen presenting cell (aAPC) of the present disclosure comprises an erythroid cell, wherein the erythroid cell presents, e.g. comprises on the cell surface, at least one exogenous antigenic polypeptide, wherein the at least one exogenous antigenic polypeptide is CD123.

[0358] In some embodiments, an artificial antigen presenting cell (aAPC) of the present disclosure comprises an erythroid cell, wherein the erythroid cell presents, e.g. comprises on the cell surface, at least one exogenous antigenic polypeptide, wherein the at least one exogenous antigenic polypeptide is CD38.

[0359] In various embodiments of the foregoing aspects, the aAPC presents, e.g. comprises on the cell surface, at least two, at least 3, at least 4, or at least 5 exogenous antigenic polypeptides.

[0360] In another aspect, the disclosure features an artificial antigen presenting cell (aAPC) engineered to activate T cells (e.g. cytotoxic CD8+ T cells), wherein the aAPC comprises an erythroid cell, wherein the erythroid cell presents, e.g. comprises on the cell surface, an exogenous antigen-presenting polypeptide and an exogenous antigenic polypeptide, wherein the exogenous antigenic polypeptide is specifically bound to the exogenous antigen-presenting polypeptide, wherein the exogenous antigen-presenting polypeptide is an MHC class I polypeptide or single chain fusion or an MHC class II polypeptide or single chain fusion, and wherein the exogenous antigenic polypeptide is from Epstein-Barr Virus (EBV). The aAPC may further comprise an exogenous costimulatory polypeptide as disclosed herein.

[0361] In another aspect, the disclosure features an artificial antigen presenting cell (aAPC) engineered to activate T cells (e.g. cytotoxic CD8+ T cells), wherein the aAPC comprises an erythroid cell, wherein the erythroid cell presents, e.g. comprises on the cell surface, an exogenous antigen-presenting polypeptide and an exogenous antigenic polypeptide, wherein the exogenous antigenic polypeptide is specifically bound to the exogenous antigen-presenting polypeptide, wherein the exogenous antigen-presenting polypeptide is an MHC class I polypeptide or single chain fusion or an MHC class II polypeptide or single chain fusion, and wherein the exogenous antigenic polypeptide is gp350 or an immunogenic peptide thereof. In a particular embodiment, the immunogenic peptide of gp350 comprises or consists of the HLA A2 peptide (VLQWASLAV (SEQ ID NO: 698)). The aAPC may further comprise an exogenous costimulatory polypeptide as disclosed herein. In a particular embodiment, the exogenous costimulatory polypeptide is 4-1BBL.

[0362] In another aspect, the disclosure features an artificial antigen presenting cell (aAPC) engineered to activate T cells (e.g. cytotoxic CD8+ T cells), wherein the aAPC comprises an erythroid cell, wherein the erythroid cell presents, e.g. comprises on the cell surface, an exogenous antigen-presenting polypeptide and an exogenous antigenic polypeptide, wherein the exogenous antigenic polypeptide is specifically bound to the exogenous antigen-presenting polypeptide, wherein the exogenous antigen-presenting polypeptide is an MHC class I polypeptide or single chain fusion or an MHC class II polypeptide or single chain fusion, and wherein the exogenous antigenic polypeptide is EBNA1 or an immunogenic peptide thereof. In a particular embodiment, the immunogenic peptide of EBNA1 comprises or consists of a peptide selected from FMVFLQTHI (SEQ ID NO: 699), FLQTHIFAEV (SEQ ID NO: 700), and SIVCYFMVFL (SEQ ID NO: 701). The aAPC may further comprise an exogenous costimulatory polypeptide as disclosed herein. In a particular embodiment, the exogenous costimulatory polypeptide is 4-1BBL.

[0363] In another aspect, the disclosure features an artificial antigen presenting cell (aAPC) engineered to expand regulatory T cells (Tregs), wherein the aAPC comprises an erythroid cell, wherein the erythroid cell presents, e.g. comprises on the cell surface, an exogenous antigen-presenting polypeptide and an exogenous antigenic polypeptide, wherein the exogenous antigenic polypeptide is specifically bound to the exogenous antigen-presenting polypeptide, wherein the exogenous antigen-presenting polypeptide is an MHC class I polypeptide or single chain fusion or an MHC class II polypeptide or single chain fusion, and wherein the exogenous antigenic polypeptide is from Epstein-Barr Virus (EBV). The aAPC may further comprise an exogenous costimulatory polypeptide as disclosed herein.

[0364] In another aspect, the disclosure features an artificial antigen presenting cell (aAPC) engineered to suppress autoreactive T cells, wherein the aAPC comprises an erythroid cell, wherein the erythroid cell presents, e.g. comprises on the cell surface, an exogenous antigen-presenting polypeptide and an exogenous antigenic polypeptide, wherein the exogenous antigenic polypeptide is specifically bound to the exogenous antigen-presenting polypeptide, wherein the exogenous antigen-presenting polypeptide is an MHC class I polypeptide or single chain fusion or an MHC class II polypeptide or single chain fusion, and wherein the exogenous antigenic polypeptide is from Epstein-Barr Virus (EBV). The aAPC may further comprise an exogenous co-inhibitory polypeptide as disclosed herein.

[0365] In another aspect, the disclosure features an aAPC engineered to activate pathogen-specific T cells, comprising an erythroid cell (e.g. an enucleated erythroid cell), wherein the aAPC comprises an erythroid cell, wherein the erythroid cell presents, e.g. comprises on the cell surface, an exogenous antigen-presenting polypeptide and an exogenous antigenic polypeptide, wherein the exogenous antigenic polypeptide is specifically bound to the exogenous antigen-presenting polypeptide, wherein the exogenous antigen-presenting polypeptide is an MHC class I polypeptide or single chain fusion or an MHC class II polypeptide or single chain fusion, and wherein the exogenous antigenic polypeptide is an antigenic polypeptide from a pathogen or infectious agent listed in Tables 21-24, or an immunogenic peptide thereof. The aAPC may further comprise an exogenous co-stimulatory polypeptide as disclosed herein.

[0366] In another aspect, the disclosure features an aAPC engineered to activate Hepatitis B Virus (HBV)-specific T cells, comprising an erythroid cell (e.g. an enucleated erythroid cell), wherein the aAPC comprises an erythroid cell, wherein the erythroid cell presents, e.g. comprises on the cell surface, an exogenous antigen-presenting polypeptide and an exogenous antigenic polypeptide, wherein the exogenous antigenic polypeptide is specifically bound to the exogenous antigen-presenting polypeptide, wherein the exogenous antigen-presenting polypeptide is an MHC class I polypeptide or single chain fusion or an MHC class II polypeptide or single chain fusion, and wherein the exogenous antigenic polypeptide is from Hepatitis B Virus (HBV). The aAPC may further comprise, e.g. on the cell surface, an exogenous costimulatory polypeptide as disclosed herein. In embodiments, the at least one costimulatory polypeptide is selected from the group consisting of 4-1BBL, IL-2, IL-12, IL-15, IL-18, IL-21, and any combination thereof, e.g., IL-12 and IL-15, or 4-1BBL and IL-15. In some embodiments, the aAPC further comprises an additional exogenous polypeptide, wherein the additional exogenous polypeptide comprises, e.g. on the cell surface, a checkpoint inhibitor. In some embodiments, the checkpoint inhibitor is an antibody molecule to PD1. In a particular embodiment, the aAPC comprises an erythroid cell, wherein the erythroid cell comprises, e.g. on the cell surface, one or more exogenous polypeptides, wherein the one or more exogenous polypeptides comprise: an exogenous antigenic polypeptide comprising an HBV-specific antigen, or an immunogenic peptide thereof, an exogenous antigen-presenting polypeptide, e.g., MHC class I or MHC class I polypeptide or single chain fusion, an exogenous costimulatory polypeptide, e.g., IL-12 or 4-1BBL, and a checkpoint inhibitor, e.g., antibody to PD1.

### Exogenous Antigen-Presenting Polypeptides

[0367] Exogenous antigen-presenting polypeptides of the present disclosure include polypeptides of the MHC gene family, which is divided into three subgroups: class I, class II, and class III.

[0368] MHC class I molecules are heterodimers that consist of two polypeptide chains, an α chain and a β2-microglobulin (b2m) chain. The class I α chains consist of a single polypeptide composed of three extracellular domains named α1, α2, and α3, a transmembrane region that anchors it in the plasma membrane, and a short intracytoplasmic tail. The b2m consists of a single molecule noncovalently bound to the α chain. Only the α chain is polymorphic and encoded by a HLA gene, while the b2m subunit is not polymorphic and encoded by the Beta-2 microglobulin gene. Class I MHC molecules have β2 subunits so can only be recognized by CD8 co-receptors.

[0369] In some embodiments of the present disclosure, the exogenous antigen-presenting polypeptide comprised in an aAPC is a Class I MHC molecule and includes a signal sequence. In some embodiments, the exogenous antigen-presenting polypeptide is a Class I MHC molecule, and does not include a signal sequence.

[0370] MHC class II molecules are also heterodimers that consist of an α and β polypeptide chain. The subdesignation of chains as e.g., α1, α2, and β1 and β2, refers to separate domains (or subunits) within the HLA gene and β gene. CD4 binds to the β2 region. In some embodiments, the exogenous antigen-presenting polypeptide is a Class II MHC molecule and includes a signal sequence. In some embodiments, the exogenous antigen-presenting polypeptide is a Class II MHC molecule, and does not include a signal sequence.

[0371] The exogenous antigen-presenting polypeptides of the present disclosure can include subunits of a cell surface complex or cell surface molecule, e.g., MHCI or MHCII, where MHCI or MHCII function to bind an exogenous antigenic polypeptide. In some embodiments, the exogenous antigen-presenting polypeptides are subunits of MHCII, and a function is to bind an exogenous antigenic polypeptide. In some embodiments, the exogenous antigen-presenting polypeptides are subunits of MHCI and a function is to bind an exogenous antigenic polypeptide. In some embodiments, the MHC class I polypeptide or the MHC Class II polypeptide comprises a leader (signal) sequence. In some embodiments, the MHC class I polypeptide or the MHC Class II polypeptide does not comprise a leader (signal) sequence. In some embodiments, a leader sequence is fused to an exogenous antigen presenting polypeptide (e.g., MHC class I or MHC class II polypeptide lacking its leader (signal) sequence). In some embodiments, the MHC Class I polypeptide is a fusion polypeptide comprising a leader sequence. In some embodiments, the MHC Class II polypeptide is a fusion polypeptide comprising a leader sequence. In some embodiments, the leader sequence is selected from the sequences set forth in Table 2.

TABLE 2
Leader Sequences

| SEQ ID | | |
|---|---|---|
| NO. | Sequence Description | Amino Acid Sequence |
| 730 | Beta 2 | MSRSVALAVLALLSLSGLEA |
| | microglobulin (b2m) | |
| | leader sequence | |
| 731 | Glycophorin A | MYGKIIFVLLLSEIVSISA |
| | (GPA) signal peptide | |

[0372] In some embodiments, an exogenous antigen-presenting polypeptide is a functional MHC I, and the exogenous antigen-presenting polypeptides are MHC I (alpha chain 1-3) and beta-2 microglobulin, or fragments or variants thereof. In some embodiments an exogenous antigen-presenting polypeptide is a functional MHC II and the exogenous antigen-presenting polypeptides are MHC II alpha chain (alpha chain 1 and 2) and MHC II beta chain (beta chain 1 and 2), or fragments or variants thereof. In some embodiments, the MHC molecule comprises human MHC class I or II, e.g., MHC II alpha subunit and MHC II beta subunit or a fusion molecule comprising both subunits or antigen-presenting fragments thereof. In some embodiments, the HLA α chain is covalently bound (e.g., in a fusion protein with) or non-covalently bound to the β chain.

[0373] An aAPC comprising an erythroid cell (e.g., an enucleated erythroid cell) or an enucleated cell, as described herein, with the antigen-presenting polypeptides described herein (e.g. MHC I and MHC II) is used, in some embodiments, for immune induction and/or antigen presentation. In some embodiments, the aAPC comprises a single protein that is a fusion between an MHC molecule and an antigen, e.g., a single-chain peptide-MHC construct comprising an MHC I or MHC II polypeptide and an exogenous antigenic polypeptide. In other embodiments, a non-membrane tethered component of the complex, e.g. the peptide, or the β2 microglobulin, is assembled with another agent within the cell prior to trafficking to the surface, is secreted by the cell and then captured on the surface by the membrane-tethered component of the multimer, or is added in a purified form to an aAPC.

[0374] In some embodiments, the antigen-presenting polypeptide comprises both an MHCI α chain and MHC I b2m chain. In some embodiments, the antigen-presenting polypeptide comprises only the MHC I α chain. In some embodiments, the antigen-presenting polypeptide comprises only the MHC I b2m chain. In some embodiments, the antigen-presenting polypeptide comprises both an MHCI α chain and MHC I b2m chain, and the MHC I α chain and MHC I b2m chain are linked non-covalently. In some embodiments, the antigen-presenting polypeptide comprises both an MHCI α chain and MHC I b2m chain, and the MHC I α chain and MHC I b2m chain are linked covalently or fused. In some embodiments, the antigen-presenting polypeptide comprises an MHC I single chain fusion, wherein an exogenous antigenic polypeptide is linked to the MHCI α chain. In some embodiments, the antigen-presenting polypeptide comprises an MHC I single chain fusion, wherein an exogenous antigenic polypeptide is linked to the MHC I b2m chain. In some embodiments, the antigen-presenting polypeptide comprises an MHC I single chain fusion, wherein the exogenous antigenic polypeptide is linked to the MHCI β2m subunit, which is linked to the MHCI α subunit.

[0375] In some embodiments, the antigen-presenting polypeptide comprises both the MHC II α chain and MHC II β chain. In some embodiments, the antigen-presenting polypeptide comprises only the MHC II α chain. In some embodiments, the antigen-presenting polypeptide comprises only the MHC II β chain. In some embodiments, the antigen-presenting polypeptide comprises both the MHC II α chain and MHC II β chain, and the MHC II α chain and MHC II β chain are linked non-covalently. In some embodiments, the antigen-presenting polypeptide comprises both the MHC II α chain and MHC II β chain, and the MHC II α chain and MHC II β chain are linked covalently or fused. In some embodiments, the antigen-presenting polypeptide comprises an MHC II single chain fusion, wherein an exogenous antigenic polypeptide is linked to the MHCII α chain. In some embodiments, the antigen-presenting polypeptide comprises an MHC II single chain fusion, wherein an exogenous antigenic polypeptide is linked to the MHC II β chain. In some embodiments, the antigen-presenting polypeptide comprises an MHC II single chain fusion, wherein the exogenous antigenic polypeptide is linked to the MHCII β-chain, which is linked to the MHCII α-chain.

[0376] In some embodiments, the MHC I single chain fusion or the MHC II single chain fusion comprises an anchor. In some embodiments, the anchor is a type 1 membrane protein. In some embodiments, the type 1 membrane protein anchor is selected from the group consisting of Glycophorin A (GPA); glycophorin B (GPB); Basigin (also known as CD147); CD44; CD58 (also known as LFA3); Intercellular Adhesion Molecule 4 (ICAM4); Basal Cell Adhesion Molecule (BCAM); CR1; CD99; Erythroblast Membrane Associated Protein (ERMAP); junctional adhesion molecule A (JAM-A); neuroplastin (NPTN); AMIGO2; and DS Cell Adhesion Molecule Like 1 (DSCAML1). In some embodiments, the anchor is a type 2 membrane protein. In some embodiments, the type 2 membrane protein anchor is selected from the group consisting of small integral membrane protein 1 (SMIM1), transferrin receptor (CD71); FasL transmembrane; and Kell. In some embodiments, the anchor is a GPI-linked membrane protein. In some embodiments, the GPI-linked membrane protein anchor is selected from the group consisting of CD59; CD55; and Semaphorin 7A (SEMA7A). In some embodiments, the anchor is small integral membrane protein 1 (SMIM1). In some embodiments, the anchor is glycophorin anchor, and in particular glycophorin A (GPA), or a fragment thereof. In some embodiments, the anchor is selected from an amino acid sequence listed in Table 3.

TABLE 3
Anchor Sequences

| SEQ | | | |
|---|---|---|---|
| ID | Sequence | Sequence | |
| NO: | name | description | Amino acid sequence |
| 727 | GPA | Full length GPA | MYGKIIFVLLLSAIVSISALSTTEVAMHTSTSS |
| | | | SVTKSYISSQTNDTHKRDTYAATPRAHEVSEI |
| | | | SVRTVYPPEEETGERVQLAHHFSEPEITLIIFG |
| | | | VMAGVIGTILLISYGIRRLIKKSPSDVKPLPSP |
| | | | DTDVPLSSVEIENPETSDQ |
| 728 | GPA | Fragment of GPA | LSTTEVAMHTSTSSSVTKSYISSQTNDTHKR |
| | | comprising a | DTYAATPRAHEVSEISVRTVYPPEEETGERV |
| | | transmembrane | QLAHHFSEPEITLIIFGVMAGVIGTILLISYGIR |
| | | domain | RLIKKSPSDVKPLPSPDTDVPLSSVEIENPETS |
| | | | DQ |
| 729 | SMIM1 | SMIM1 | MQPQESHVHYSRWEDGSRDGVSLGAVSSTE |
| | | | EASRCRRISQRLCTGKLGIAMKVLGGVALF |
| | | | WIIFILGYLTGYYVHKCK |

[0377] In some embodiments, the exogenous antigenic polypeptide is connected to the MHC class I or MHC class II single chain fusion via a linker. In some embodiments, the MHC class I or MHC class II single chain fusion is connected to an anchor sequence via a linker. In one embodiment, the linker is a cleavable linker. In some embodiments, the linker is selected from an amino acid sequence listed in Table 4.

TABLE 4
Linker Sequences

| SEQ ID | Sequence | |
|---|---|---|
| NO. | Description | Amino Acid Sequence |
| 732 | Linker | GGGGSGGGGSGGGGS |
| 733 | Linker | GGGGSGGGGSGGGGSGGGGS |
| 734 | Linker | GSGSGSGSEDGSGSGSGS |
| 735 | Linkr | GSGSGSGSGSGSGSGSGS |
| 736 | Linker | GCGGSGGGGSGGGGS |
| 737 | Linker | GGSGGSGGGGGSGGGSGGGSGGGS |
| 738 | Linker | SGRGGGGSGGGGSGGGGSGGGGSSPA |
| 739 | Linker | GGGGSGGGGSGGGGSGGGGSGGGG |
| 740 | Snorkel linker | SGRGASSGSSGSGSQKKPRYEIRWKVVVI |
| | | SAILALVVLTVISLIILIMLWGSGMQSPA |
| | | (“snorkel linker”) |

[0378] In some embodiments, the exogenous antigenic polypeptide is loaded on the MHCI molecule, and a function is to present the exogenous antigenic polypeptide. In some embodiments, the exogenous antigenic polypeptide is loaded on the MHCII molecule, and a function is to present the exogenous antigenic polypeptide. In some embodiments, the exogenous antigenic polypeptides are presented on antigen-presenting polypeptides, e.g., the exogenous antigenic polypeptide is specifically bound to the exogenous antigen-presenting polypeptides, e.g. MHC class I and/or class II molecules. The exogenous antigenic polypeptide may be bound either covalently or non-covalently to the antigen-presenting polypeptide. In some embodiments, the exogenous antigenic peptide is free, and can be specifically bound to the antigen-presenting polypeptide present on cell surface of the artificial antigen presenting cell. In some embodiments, coupling reagents can be used to link an exogenous polypeptide to an antigen-presenting polypeptide present on the cell surface. In some embodiments, click chemistry, as described in detail herein, can be used to link an exogenous polypeptide to an antigen-presenting polypeptide present on the cell surface.

[0379] Multiple assays for assessing binding affinity and/or determining whether an antigenic polypeptide specifically binds to a particular ligand (e.g., an MHC molecule) are known in the art. For example, in some embodiments, surface plasmon resonance (Biacore®) can be used to determine the binding constant of a complex between two polypeptides. In this assay, the dissociation constant for the complex can be determined by monitoring changes in the refractive index with respect to time as buffer is passed over the chip. Other suitable assays for measuring the binding of one polypeptide to another include, for example, immunoassays such as enzyme linked immunosorbent assays (ELISA) and radioimmunoassays (RIA), or determination of binding by monitoring the change in the spectroscopic or optical properties of the proteins using fluorescence, UV absorption, circular dichroism, or nuclear magnetic resonance (NMR). Other exemplary assays include, but are not limited to, Western blot, analytical ultracentrifugation, and spectroscopy (see, e.g., Scatchard et al (1949) Ann. N.Y. Acad. Sci. 51:660; Wilson (2002) Science 295: 2103; Woffi et al. (1993) Cancer Res. 53:2560; U.S. Pat. Nos. 5,283,173, 5,468,614; and International Patent Publication No. WO 2018/005559. Alternatively, binding of an antigenic polypeptide to a particular ligand (e.g., an MHC molecule) may be determined using a predictive algorithm. For example, methods for predicting MHC class II and class II epitopes are well known in the art, and include TEPITOPE (see, e.g., Meister et al. (1995) Vaccine 13: 581-91), EpiMatrix (De Groot et al. (1997) AIDS Res Hum Retroviruses 13: 529-31), the Predict Method (Yu et al. (2002) Mol. Med. 8: 137-48), the SYFPEITHI epitope prediction algorithm (Schuler et al. (2007) Methods Mol Biol. 409: 75-93, and Rankpep (Reche et al. (2002) Hum Immunol. 63(9): 701-9). Additional algorithms for predicting MHC class I and class II epitopes are described, for example, in Kessler and Melief (2007) Leukemia 21(9): 1859-74.

[0380] In some embodiments, an exogenous antigen-presenting polypeptide is selected from the group consisting of HLA-A, HLA-B, HLA-C, HLA-DRB1, HLA-DQA1, HLA-DQB1, HLA-DPA1, HLA-DPB1, that are capable of binding antigens and displaying them on the cell surface.

[0381] In some embodiments, the exogenous antigen-presenting polypeptide is an MHC class I polypeptide or an MHC class I single chain fusion. In a further embodiment, the MHC class I polypeptide is HLA-A. In some embodiments, an HLA-A polypeptide comprises an HLA-A single chain fusion polypeptide, wherein the HLA-A polypeptide is linked to an exogenous antigenic polypeptide. In some embodiments, the HLA-A single chain fusion polypeptide includes a membrane anchor. In some embodiments, the membrane anchor is selected from a membrane anchor set forth in Table 3. In some embodiments, the HLA-A single chain fusion polypeptide includes a linker (e.g., between the antigenic peptide and beta chain, between the beta chain and alpha chain, or between the alpha chain and anchor). In some embodiments, the linker is selected from a sequence set forth in Table 4. In some embodiments, the HLA-A single chain fusion polypeptide includes a leader sequence. In some embodiments, the leader sequence is selected from a sequence set forth in Table 2 In some embodiments, an HLA-A leader sequence is fused to an exogenous antigen-presenting polypeptide, which is linked to a membrane anchor.

[0382] In some embodiments, the exogenous antigen-presenting polypeptide is an MHC class I polypeptide or an MHC class I single chain fusion. In a further embodiment, the MHC class I polypeptide is HLA-B. In some embodiments, an HLA-B polypeptide comprises an HLA-B single chain fusion polypeptide, wherein the HLA-B polypeptide is linked to an exogenous antigenic polypeptide. In some embodiments, the HLA-B single chain fusion polypeptide includes a membrane anchor. In some embodiments, the membrane anchor is selected from a membrane anchor set forth in Table 3. In some embodiments, the HLA-B single chain fusion polypeptide includes a linker (e.g., between the antigenic peptide and beta chain, between the beta chain and alpha chain, or between the alpha chain and anchor). In some embodiments, the linker is selected from a sequence set forth in Table 4. In some embodiments, the HLA-B single chain fusion polypeptide includes a leader sequence. In some embodiments, the leader sequence is selected from a sequence set forth in Table 2. In some embodiments, an HLA-B leader sequence is fused to an exogenous antigen-presenting polypeptide, which is linked to a membrane anchor.

[0383] In some embodiments, the exogenous antigen-presenting polypeptide is an MHC class I polypeptide or an MHC class I single chain fusion. In a further embodiment, the MHC class I polypeptide is HLA-C. In some embodiments, an HLA-C polypeptide comprises an HLA-C single chain fusion polypeptide, wherein the HLA-C polypeptide is linked to an exogenous antigenic polypeptide. In some embodiments, the HLA-C single chain fusion polypeptide includes a membrane anchor. In some embodiments, the membrane anchor is selected from a sequence set forth in Table 3. In some embodiments, the HLA-C single chain fusion polypeptide includes a linker (e.g., between the antigenic peptide and beta chain, between the beta chain and alpha chain, or between the alpha chain and anchor). In some embodiments, the linker is selected from a sequence set forth in Table 4. In some embodiments, the HLA-C single chain fusion polypeptide includes a leader sequence. In some embodiments, the leader sequence is selected from a sequence set forth in Table 2. In some embodiments, an HLA-C leader sequence is fused to an exogenous antigen-presenting polypeptide, which is linked to a membrane anchor.

[0384] In some embodiments, the exogenous antigen-presenting polypeptide is an MHC class II polypeptide or an MHC class II single chain fusion. In a further embodiment, the MHC class II polypeptide is selected from the group consisting of HLA-DPα, HLA-DPβ, HLA-DM, HLA DOA, HLA-DOB, HLA-DQα, HLA-DQβ, HLA-DRα, and HLA-DRβ. In some embodiments, an HLA-DPA polypeptide comprises an HLA-DPA single chain fusion polypeptide, wherein the HLA-DPA polypeptide is linked to an exogenous antigenic polypeptide. In some embodiments, an HLA-DPB polypeptide comprises an HLA-DPB single chain fusion polypeptide, wherein the HLA-DPB polypeptide is linked to an exogenous antigenic polypeptide. In some embodiments, an HLA-DM polypeptide comprises an HLA-DM single chain fusion polypeptide, wherein the HLA-DM polypeptide is linked to an exogenous antigenic polypeptide. In some embodiments, an HLA-DOA polypeptide comprises an HLA-DOA single chain fusion polypeptide, wherein the HLA-DOA polypeptide is linked to an exogenous antigenic polypeptide. In some embodiments, an HLA-DOB polypeptide comprises an HLA-DOB single chain fusion polypeptide, wherein the HLA-DOB polypeptide is linked to an exogenous antigenic polypeptide. In some embodiments, an HLA-DQA polypeptide comprises an HLA-DQA single chain fusion polypeptide, wherein the HLA-DQA polypeptide is linked to an exogenous antigenic polypeptide. In some embodiments, an HLA-DQB polypeptide comprises an HLA-DQB single chain fusion polypeptide, wherein the HLA-DQB polypeptide is linked to an exogenous antigenic polypeptide. In some embodiments, an HLA-DRA polypeptide comprises an HLA-DRA single chain fusion polypeptide, wherein the HLA-DRA polypeptide is linked to an exogenous antigenic polypeptide. In some embodiments, an HLA-DRB polypeptide comprises an HLA-DRB single chain fusion polypeptide, wherein the HLA-DRB polypeptide is linked to an exogenous antigenic polypeptide. In some embodiments, the single chain fusion polypeptides include a membrane anchor. In some embodiments, the membrane anchor is selected from a sequence set forth in Table 3. In some embodiments, the single chain fusion polypeptides include a linker (e.g., between the antigenic peptide and beta chain, between the beta chain and alpha chain, or between the alpha chain and anchor). In some embodiments, the linker is selected from a sequence set forth in Table 4. In some embodiments, the single chain fusion polypeptides include a leader sequence. In some embodiments, the leader sequence is selected from a sequence set forth in Table 2.

[0385] The protein products of MHC class I and class II genes are known to be highly polymorphic, thus the present disclosure also encompasses MHC polymorphs. There are more than 200 alleles of some human MHC class I and class II genes. With the exception of the DRα locus, which is functionally monomorphic, each locus has many alleles (Janeway C A Jr, Travers P, Walport M, et al. Immunobiology: The Immune System in Health and Disease. 5th edition. New York: Garland Science; 2001, incorporated by reference in its entirety herein), each allele being present at a relatively high frequency in the population.

[0386] In some embodiments, the MHC class I polypeptide is HLA-A. In some embodiments, the HLA-A polypeptide comprises an HLA-A allele selected from the group consisting of A*01:01, A*02:01, A *03:01, A*24:02, A*11:01, A*29:02, A*32:01, A*68:01, A*31:01, A*25:01, A*26:01, A*23:01, A*30:01.

[0387] In some embodiments, the MHC class I polypeptide is HLA-B. In some embodiments, the HLA-B polypeptide comprises an HLA-B allele selected from the group consisting of B*08:01, B*07:02, B*44:02, B*15:01, B*40:01, B*44:03, B*35:01, B*51:01, B*27:05, B*57:01, B*18:01, B*14:02, B*13:02, B*55:01, B*14:01, B*49:01, B*37:01, B*38:01, B*39:01, B*35:03, B*40:02.

[0388] In some embodiments, the MHC class I polypeptide is HLA-C. In some embodiments, the HLA-C polypeptide comprises an HLA-C allele selected from the group consisting of C*07:01, C*07:02, C*05:01, C*06:02, C*04:01, C*03:04, C*03:03, C*02:02, C*16:01, C*08:02, C*12:03, C*01:02, C*15:02, C*07:04, C*14:02.

[0389] In some embodiments, the MHC class II polypeptide is selected from the group consisting of HLA-DPα, HLA-DPβ, HLA-DM, HLA DOA, HLA-DOB, HLA-DQα, HLA-DQβ, HLA-DRα, and HLA-DRβ. In some embodiments, the HLA-DPα polypeptide comprises an HLA-DPα allele selected from the group consisting of DPA1*01:03, DPA1*02:01, DPA1*02:07. In some embodiments, the HLA-DPβ polypeptide comprises an HLA-DPβ allele selected from the group consisting of DPB1*04:01, DPB1*02:01, DPB1*04:02, DPB1*03:01, DPB1*01:01, DPB1*11:01, DPB1*05:01, DPB1*10:01, DPB1*06:01, DPB1*13:01, DPB1*14:01, and DPB1*17:01. In some embodiments, the HLA-DQα polypeptide comprises an HLA-DQα allele selected from the group consisting of DQA1*05:01, DQA1*03:01, DQA1*01:02, DQA1*02:01, DQA1*01:01, DQA1*01:03, and DQA1*04:01. In some embodiments, the HLA-DQβ polypeptide comprises an HLA-DQβ allele selected from the group consisting of DQB1*03:01, DQB1*02:01, DQB1*06:02, DQB1*05:01, DQB1*02:02, DQB1*03:02, DQB1*06:03, DQB1*03:03, DQB1*06:04, DQB1*05:03, and DQB1*04:02. In some embodiments, the HLA-DRβ polypeptide comprises an HLA-DRβ allele selected from the group consisting of DRB1*07:01, DRB1*03:01, DRB1*15:01, DRB1*04:01, DRB1*01:01, DRB1*13:01, DRB1*11:01, DRB1*04:04, DRB1*13:02, DRB1*08:01, DRB1*12:01, DRB1*11:04, DRB1*09:01, DRB1*14:01, DRB1*04:07, and DRB1*14:04.

[0390] In some embodiments, an antigen-presenting polypeptide comprises an HLA allele polypeptide comprising or consisting of an amino acid sequence set forth in Table 5. In some embodiments, the MHC allele polypeptide comprises a signal peptide. In other embodiments, the MHC allele polypeptide does not include a signal peptide. Accordingly, in some embodiments, the antigen-presenting polypeptide comprises the amino acid sequence of any one of SEQ ID NOs 741-838, shown in Table 5, excluding the signal peptide amino acid sequence (shown underlined in the sequences in Table 5). In other embodiments, the antigen-presenting polypeptide comprises the amino acid sequence of any one of SEQ ID NOs 741-838 shown in Table 5 including the signal peptide amino acid sequence (shown underlined in Table 5).

TABLE 5
HLA Alleles

| | | |
|---|---|---|
| A*01:01 | MAVMAPRTLLLLLSGALALTQTWAGSHSMRYFF | (SEQ ID NO: |
| (IMGT/HLA | TSVSRPGRGEPRFIAVGYVDDTQFVRFDSDAASQ | 741) |
| Accession No. | KMEPRAPWIEQEGPEYWDQETRNMKAHSQTDR | |
| HLA00001) | ANLGTLRGYYNQSEDGSHTIQIMYGCDVGPDGR | |
| * Predicted signal | FLRGYRQDAYDGKDYIALNEDLRSWTAADMAA | |
| peptide underlined | QITKRKWEAVHAAEQRRVYLEGRCVDGLRRYL | |
| | ENGKETLQRTDPPKTHMTHHPISDHEATLRCWA | |
| | LGFYPAEITLTWQRDGEDQTQDTELVETRPAGD | |
| | GTFQKWAAVVVPSGEEQRYTCHVQHEGLPKPLT | |
| | LRWELSSQPTIPIVGIIAGLVLLGAVITGAVVAAV | |
| | MWRRKSSDRKGGSYTQAASSDSAQGSDVSLTAC | |
| | KV | |
| A*02:01 | MAVMAPRTLVLLLSGALALTQTWAGSHSMRYF | (SEQ ID NO: |
| (IMGT/HLA | FTSVSRPGRGEPRFIAVGYVDDTQFVRFDSDAAS | 742) |
| Accession No. | QRMEPRAPWIEQEGPEYWDGETRKVKAHSQTH | |
| HLA00005) | RVDLGTLRGYYNQSEAGSHTVQRMYGCDVGSD | |
| * Predicted signal | WRFLRGYHQYAYDGKDYIALKEDLRSWTAADM | |
| peptide underlined | AAQTTKHKWEAAHVAEQLRAYLEGTCVEWLRR | |
| | YLENGKETLQRTDAPKTHMTHHAVSDHEATLRC | |
| | WALSFYPAEITLTWQRDGEDQTQDTELVETRPA | |
| | GDGTFQKWAAVVVPSGQEQRYTCHVQHEGLPK | |
| | PLTLRWEPSSQPTIPIVGIIAGLVLFGAVITGAVVA | |
| | AVMWRRKSSDRKGGSYSQAASSDSAQGSDVSLT | |
| | ACKV | |
| A*03:01 | MAVMAPRTLLLLLSGALALTQTWAGSHSMRYFF | (SEQ ID NO: |
| (IMGT/HLA | TSVSRPGRGEPRFIAVGYVDDTQFVRFDSDAASQ | 743) |
| Accession No. | RMEPRAPWIEQEGPEYWDQETRNVKAQSQTDR | |
| HLA00037) | VDLGTLRGYYNQSEAGSHTIQIMYGCDVGSDGR | |
| * Predicted signal | FLRGYRQDAYDGKDYIALNEDLRSWTAADMAA | |
| peptide underlined | QITKRKWEAAHEAEQLRAYLDGTCVEWLRRYL | |
| | ENGKETLQRTDPPKTHMTHHPISDHEATLRCWA | |
| | LGFYPAEITLTWQRDGEDQTQDTELVETRPAGD | |
| | GTFQKWAAVVVPSGEEQRYTCHVQHEGLPKPLT | |
| | LRWELSSQPTIPIVGIIAGLVLLGAVITGAVVAAV | |
| | MWRRKSSDRKGGSYTQAASSDSAQGSDVSLTAC | |
| | KV | |
| A*24:02 | MAVMAPRTLVLLLSGALALTQTWAGSHSMRYF | (SEQ ID NO: |
| (IMGT/HLA | STSVSRPGRGEPRFIAVGYVDDTQFVRFDSDAAS | 744) |
| Accession No. | QRMEPRAPWIEQEGPEYWDEETGKVKAHSQTDR | |
| HLA00050) | ENLRIALRYYNQSEAGSHTLQMMFGCDVGSDGR | |
| * Predicted signal | FLRGYHQYAYDGKDYIALKEDLRSWTAADMAA | |
| peptide underlined | QITKRKWEAAHVAEQQRAYLEGTCVDGLRRYL | |
| | ENGKETLQRTDPPKTHMTHHPISDHEATLRCWA | |
| | LGFYPAEITLTWQRDGEDQTQDTELVETRPAGD | |
| | GTFQKWAAVVVPSGEEQRYTCHVQHEGLPKPLT | |
| | LRWEPSSQPTVPIVGIIAGLVLLGAVITGAVVAAV | |
| | MWRRNSSDRKGGSYSQAASSDSAQGSDVSLTAC | |
| | KV | |
| A*11:01 | MAVMAPRTLLLLLSGALALTQTWAGSHSMRYF | (SEQ ID NO: |
| (IMGT/HLA | YTSVSRPGRGEPRFIAVGYVDDTQFVRFDSDAAS | 745) |
| Accession No. | QRMEPRAPWIEQEGPEYWDQETRNVKAQSQTD | |
| HLA00043) | RVDLGTLRGYYNQSEDGSHTIQIMYGCDVGPDG | |
| * Predicted signal | RFLRGYRQDAYDGKDYIALNEDLRSWTAADMA | |
| peptide underlined | AQITKRKWEAAHAAEQQRAYLEGRCVEWLRRY | |
| | LENGKETLQRTDPPKTHMTHHPISDHEATLRCW | |
| | ALGFYPAEITLTWQRDGEDQTQDTELVETRPAG | |
| | DGTFQKWAAVVVPSGEEQRYTCHVQHEGLPKPL | |
| | TLRWELSSQPTIPIVGIIAGLVLLGAVITGAVVAA | |
| | VMWRRKSSDRKGGSYTQAASSDSAQGSDVSLT | |
| | ACKV | |
| A*29:02 | MAVMAPRTLLLLLLGALALTQTWAGSHSMRYF | (SEQ ID NO: |
| (IMGT/HLA | TTSVSRPGRGEPRFIAVGYVDDTQFVRFDSDAAS | 746) |
| Accession No. | QRMEPRAPWIEQEGPEYWDLQTRNVKAQSQTD | |
| HLA00086) | RANLGTLRGYYNQSEAGSHTIQMMYGCDVGSD | |
| * Predicted signal | GRFLRGYRQDAYDGKDYIALNEDLRSWTAADM | |
| peptide underlined | AAQITQRKWEAARVAEQLRAYLEGTCVEWLRR | |
| | YLENGKETLQRTDAPKTHMTHHAVSDHEATLRC | |
| | WALSFYPAEITLTWQRDGEDQTQDTELVETRPA | |
| | GDGTFQKWASVVVPSGQEQRYTCHVQHEGLPK | |
| | PLTLRWEPSSQPTIPIVGIIAGLVLFGAVFAGAVV | |
| | AAVRWRRKSSDRKGGSYSQAASSDSAQGSDMS | |
| | LTACKV | |
| A*32:01 | MAVMAPRTLLLLLLGALALTQTWAGSHSMRYF | (SEQ ID NO: |
| (IMGT/HLA | FTSVSRPGRGEPRFIAVGYVDDTQFVRFDSDAAS | 747) |
| Accession No. | QRMEPRAPWIEQEGPEYWDQETRNVKAHSQTD | |
| HLA00101) | RESLRIALRYYNQSEAGSHTIQMMYGCDVGPDG | |
| * Predicted signal | RLLRGYQQDAYDGKDYIALNEDLRSWTAADMA | |
| peptide underlined | AQITQRKWEAARVAEQLRAYLEGTCVEWLRRY | |
| | LENGKETLQRTDAPKTHMTHHAVSDHEATLRC | |
| | WALSFYPAEITLTWQRDGEDQTQDTELVETRPA | |
| | GDGTFQKWASVVVPSGQEQRYTCHVQHEGLPK | |
| | PLTLRWEPSSQPTIPIVGIIAGLVLFGAMFAGAVV | |
| | AAVRWRRKSSDRKGGSYSQAASSDSAQGSDMS | |
| | LTACKV | |
| A*68:01 | MAVMAPRTLVLLLSGALALTQTWAGSHSMRYF | (SEQ ID NO: |
| (IMGT/HLA | YTSVSRPGRGEPRFIAVGYVDDTQFVRFDSDAAS | 748) |
| Accession No. | QRMEPRAPWIEQEGPEYWDRNTRNVKAQSQTD | |
| HLA00115) | RVDLGTLRGYYNQSEAGSHTIQMMYGCDVGSD | |
| * Predicted signal | GRFLRGYRQDAYDGKDYIALKEDLRSWTAADM | |
| peptide underlined | AAQTTKHKWEAAHVAEQWRAYLEGTCVEWLR | |
| | RYLENGKETLQRTDAPKTHMTHHAVSDHEATLR | |
| | CWALSFYPAEITLTWQRDGEDQTQDTELVETRP | |
| | AGDGTFQKWVAVVVPSGQEQRYTCHVQHEGLP | |
| | KPLTLRWEPSSQPTIPIVGIIAGLVLFGAVITGAVV | |
| | AAVMWRRKSSDRKGGSYSQAASSDSAQGSDVS | |
| | LTACKV | |
| A*31:01 | MAVMAPRTLLLLLLGALALTQTWAGSHSMRYF | (SEQ ID NO: |
| (IMGT/HLA | TTSVSRPGRGEPRFIAVGYVDDTQFVRFDSDAAS | 749) |
| Accession No. | QRMEPRAPWIEQERPEYWDQETRNVKAHSQIDR | |
| HLA00092) | VDLGTLRGYYNQSEAGSHTIQMMYGCDVGSDG | |
| * Predicted signal | RFLRGYQQDAYDGKDYIALNEDLRSWTAADMA | |
| peptide underlined | AQITQRKWEAARVAEQLRAYLEGTCVEWLRRY | |
| | LENGKETLQRTDPPKTHMTHHAVSDHEATLRCW | |
| | ALSFYPAEITLTWQRDGEDQTQDTELVETRPAGD | |
| | GTFQKWASVVVPSGQEQRYTCHVQHEGLPKPLT | |
| | LRWEPSSQPTIPIVGIIAGLVLFGAVFAGAVVAAV | |
| | RWRRKSSDRKGGSYSQAASSDSAQGSDMSLTAC | |
| | KV | |
| A*25:01 | MAVMAPRTLVLLLSGALALTQTWAGSHSMRYF | (SEQ ID NO: |
| (IMGT/HLA | YTSVSRPGRGEPRFIAVGYVDDTQFVRFDSDAAS | 750) |
| Accession No. | QRMEPRAPWIEQEGPEYWDRNTRNVKAHSQTD | |
| HLA00071) | RESLRIALRYYNQSEDGSHTIQRMYGCDVGPDG | |
| * Predicted signal | RFLRGYQQDAYDGKDYIALNEDLRSWTAADMA | |
| peptide underlined | AQITQRKWETAHEAEQWRAYLEGRCVEWLRRY | |
| | LENGKETLQRTDAPKTHMTHHAVSDHEATLRC | |
| | WALSFYPAEITLTWQRDGEDQTQDTELVETRPA | |
| | GDGTFQKWASVVVPSGQEQRYTCHVQHEGLPK | |
| | PLTLRWEPSSQPTIPIVGIIAGLVLFGAVIAGAVVA | |
| | AVMWRRKSSDRKGGSYSQAASSDSAQGSDMSL | |
| | TACKV | |
| A*26:01 | MAVMAPRTLVLLLSGALALTQTWAGSHSMRYF | (SEQ ID NO: |
| (IMGT/HLA | YTSVSRPGRGEPRFIAVGYVDDTQFVRFDSDAAS | 751) |
| Accession No. | QRMEPRAPWIEQEGPEYWDRNTRNVKAHSQTD | |
| HLA00073) | RANLGTLRGYYNQSEDGSHTIQRMYGCDVGPDG | |
| * Predicted signal | RFLRGYQQDAYDGKDYIALNEDLRSWTAADMA | |
| peptide underlined | AQITQRKWETAHEAEQWRAYLEGRCVEWLRRY | |
| | LENGKETLQRTDAPKTHMTHHAVSDHEATLRC | |
| | WALSFYPAEITLTWQRDGEDQTQDTELVETRPA | |
| | GDGTFQKWASVVVPSGQEQRYTCHVQHEGLPK | |
| | PLTLRWEPSSQPTIPIVGIIAGLVLFGAVIAGAVVA | |
| | AVMWRRKSSDRKGGSYSQAASSDSAQGSDMSL | |
| | TACKV | |
| A*23:01 | MAVMAPRTLVLLLSGALALTQTWAGSHSMRYF | (SEQ ID NO: |
| (IMGT/HLA | STSVSRPGRGEPRFIAVGYVDDTQFVRFDSDAAS | 752) |
| Accession No. | QRMEPRAPWIEQEGPEYWDEETGKVKAHSQTDR | |
| HLA00048) | ENLRIALRYYNQSEAGSHTLQMMFGCDVGSDGR | |
| * Predicted signal | FLRGYHQYAYDGKDYIALKEDLRSWTAADMAA | |
| peptide underlined | QITQRKWEAARVAEQLRAYLEGTCVDGLRRYLE | |
| | NGKETLQRTDPPKTHMTHHPISDHEATLRCWAL | |
| | GFYPAEITLTWQRDGEDQTQDTELVETRPAGDG | |
| | TFQKWAAVVVPSGEEQRYTCHVQHEGLPKPLTL | |
| | RWEPSSQPTVHIVGIIAGLVLLGAVITGAVVAAV | |
| | MWRRNSSDRKGGSYSQAASSDSAQGSDVSLTAC | |
| | KV | |
| A*30:01 | MAVMAPRTLLLLLSGALALTQTWAGSHSMRYFS | (SEQ ID NO: |
| (IMGT/HLA | TSVSRPGSGEPRFIAVGYVDDTQFVRFDSDAASQ | 753) |
| Accession No. | RMEPRAPWIEQERPEYWDQETRNVKAQSQTDRV | |
| HLA00089) | DLGTLRGYYNQSEAGSHTIQIMYGCDVGSDGRF | |
| * Predicted signal | LRGYEQHAYDGKDYIALNEDLRSWTAADMAAQ | |
| peptide underlined | ITQRKWEAARWAEQLRAYLEGTCVEWLRRYLE | |
| | NGKETLQRTDPPKTHMTHHPISDHEATLRCWAL | |
| | GFYPAEITLTWQRDGEDQTQDTELVETRPAGDG | |
| | TFQKWAAVVVPSGEEQRYTCHVQHEGLPKPLTL | |
| | RWELSSQPTIPIVGIIAGLVLLGAVITGAVVAAVM | |
| | WRRKSSDRKGGSYTQAASSDSAQGSDVSLTACKV | |
| C*07:01 | MRVMAPRALLLLLSGGLALTETWACSHSMRYF | (SEQ ID NO: |
| (IMGT/HLA | DTAVSRPGRGEPRFISVGYVDDTQFVRFDSDAAS | 754) |
| Accession No. | PRGEPRAPWVEQEGPEYWDRETQNYKRQAQAD | |
| HLA00433) | RVSLRNLRGYYNQSEDGSHTLQRMYGCDLGPD | |
| * Predicted signal | GRLLRGYDQSAYDGKDYIALNEDLRSWTAADT | |
| peptide underlined | AAQITQRKLEAARAAEQLRAYLEGTCVEWLRRY | |
| | LENGKETLQRAEPPKTHVTHHPLSDHEATLRCW | |
| | ALGFYPAEITLTWQRDGEDQTQDTELVETRPAG | |
| | DGTFQKWAAVVVPSGQEQRYTCHMQHEGLQEP | |
| | LTLSWEPSSQPTIPIMGIVAGLAVLVVLAVLGAV | |
| | VTAMMCRRKSSGGKGGSCSQAACSNSAQGSDES | |
| | LITCKA | |
| C*07:02 | MRVMAPRALLLLLSGGLALTETWACSHSMRYF | (SEQ ID NO: |
| (IMGT/HLA | DTAVSRPGRGEPRFISVGYVDDTQFVRFDSDAAS | 755) |
| Accession No. | PRGEPRAPWVEQEGPEYWDRETQKYKRQAQAD | |
| HLA00434) | RVSLRNLRGYYNQSEDGSHTLQRMSGCDLGPDG | |
| * Predicted signal | RLLRGYDQSAYDGKDYIALNEDLRSWTAADTA | |
| peptide underlined | AQITQRKLEAARAAEQLRAYLEGTCVEWLRRYL | |
| | ENGKETLQRAEPPKTHVTHHPLSDHEATLRCWA | |
| | LGFYPAEITLTWQRDGEDQTQDTELVETRPAGD | |
| | GTFQKWAAVVVPSGQEQRYTCHMQHEGLQEPL | |
| | TLSWEPSSQPTIPIMGIVAGLAVLVVLAVLGAVV | |
| | TAMMCRRKSSGGKGGSCSQAACSNSAQGSDESL | |
| | ITCKA | |
| C*05:01 | MRVMAPRTLILLLSGALALTETWACSHSMRYFY | (SEQ ID NO: |
| (IMGT/HLA | TAVSRPGRGEPRFIAVGYVDDTQFVQFDSDAASP | 756) |
| Accession No. | RGEPRAPWVEQEGPEYWDRETQKYKRQAQTDR | |
| HLA00427) | VNLRKLRGYYNQSEAGSHTLQRMYGCDLGPDG | |
| * Predicted signal | RLLRGYNQFAYDGKDYIALNEDLRSWTAADKA | |
| peptide underlined | AQITQRKWEAAREAEQRRAYLEGTCVEWLRRY | |
| | LENGKKTLQRAEHPKTHVTHHPVSDHEATLRCW | |
| | ALGFYPAEITLTWQRDGEDQTQDTELVETRPAG | |
| | DGTFQKWAAVVVPSGEEQRYTCHVQHEGLPEPL | |
| | TLRWGPSSQPTIPIVGIVAGLAVLAVLAVLGAVM | |
| | AVVMCRRKSSGGKGGSCSQAASSNSAQGSDESL | |
| | IACKA | |
| C*06:02 | MRVMAPRTLILLLSGALALTETWACSHSMRYFD | (SEQ ID NO: |
| (IMGT/HLA | TAVSRPGRGEPRFISVGYVDDTQFVRFDSDAASP | 757) |
| Accession No. | RGEPRAPWVEQEGPEYWDRETQKYKRQAQADR | |
| HLA00430) | VNLRKLRGYYNQSEDGSHTLQWMYGCDLGPDG | |
| * Predicted signal | RLLRGYDQSAYDGKDYIALNEDLRSWTAADTA | |
| peptide underlined | AQITQRKWEAAREAEQWRAYLEGTCVEWLRRY | |
| | LENGKETLQRAEHPKTHVTHHPVSDHEATLRCW | |
| | ALGFYPAEITLTWQRDGEDQTQDTELVETRPAG | |
| | DGTFQKWAAVVVPSGEEQRYTCHVQHEGLPEPL | |
| | TLRWEPSSQPTIPIVGIVAGLAVLAVLAVLGAVM | |
| | AVVMCRRKSSGGKGGSCSQAASSNSAQGSDESL | |
| | IACKA | |
| C*04:01 | MRVMAPRTLILLLSGALALTETWAGSHSMRYFS | (SEQ ID NO: |
| (IMGT/HLA | TSVSWPGRGEPRFIAVGYVDDTQFVRFDSDAASP | 758) |
| Accession No. | RGEPREPWVEQEGPEYWDRETQKYKRQAQADR | |
| HLA00420) | VNLRKLRGYYNQSEDGSHTLQRMFGCDLGPDG | |
| * Predicted signal | RLLRGYNQFAYDGKDYIALNEDLRSWTAADTA | |
| peptide underlined | AQITQRKWEAAREAEQRRAYLEGTCVEWLRRY | |
| | LENGKETLQRAEHPKTHVTHHPVSDHEATLRCW | |
| | ALGFYPAEITLTWQWDGEDQTQDTELVETRPAG | |
| | DGTFQKWAAVVVPSGEEQRYTCHVQHEGLPEPL | |
| | TLRWKPSSQPTIPIVGIVAGLAVLAVLAVLGAMV | |
| | AVVMCRRKSSGGKGGSCSQAASSNSAQGSDESL | |
| | IACKA | |
| C*03:04 | MRVMAPRTLILLLSGALALTETWAGSHSMRYFY | (SEQ ID NO: |
| (IMGT/HLA | TAVSRPGRGEPHFIAVGYVDDTQFVRFDSDAASP | 759) |
| Accession No. | RGEPRAPWVEQEGPEYWDRETQKYKRQAQTDR | |
| HLA00413) | VSLRNLRGYYNQSEAGSHIIQRMYGCDVGPDGR | |
| * Predicted signal | LLRGYDQYAYDGKDYIALNEDLRSWTAADTAA | |
| peptide underlined | QITQRKWEAAREAEQLRAYLEGLCVEWLRRYLK | |
| | NGKETLQRAEHPKTHVTHHPVSDHEATLRCWAL | |
| | GFYPAEITLTWQWDGEDQTQDTELVETRPAGDG | |
| | TFQKWAAVVVPSGEEQRYTCHVQHEGLPEPLTL | |
| | RWEPSSQPTIPIVGIVAGLAVLAVLAVLGAVVAV | |
| | VMCRRKSSGGKGGSCSQAASSNSAQGSDESLIAC | |
| | KA | |
| C*03:03 | MRVMAPRTLILLLSGALALTETWAGSHSMRYFY | (SEQ ID NO: |
| (IMGT/HLA | TAVSRPGRGEPHFIAVGYVDDTQFVRFDSDAASP | 760) |
| Accession No. | RGEPRAPWVEQEGPEYWDRETQKYKRQAQTDR | |
| HLA00411) | VSLRNLRGYYNQSEARSHIIQRMYGCDVGPDGR | |
| * Predicted signal | LLRGYDQYAYDGKDYIALNEDLRSWTAADTAA | |
| peptide underlined | QITQRKWEAAREAEQLRAYLEGLCVEWLRRYLK | |
| | NGKETLQRAEHPKTHVTHHPVSDHEATLRCWAL | |
| | GFYPAEITLTWQWDGEDQTQDTELVETRPAGDG | |
| | TFQKWAAVVVPSGEEQRYTCHVQHEGLPEPLTL | |
| | RWEPSSQPTIPIVGIVAGLAVLAVLAVLGAVVAV | |
| | VMCRRKSSGGKGGSCSQAASSNSAQGSDESLIAC | |
| | KA | |
| C*02:02 | MRVMAPRTLLLLLSGALALTETWACSHSMRYFY | (SEQ ID NO: |
| (IMGT/HLA | TAVSRPSRGEPHFIAVGYVDDTQFVRFDSDAASP | 761) |
| Accession No. | RGEPRAPWVEQEGPEYWDRETQKYKRQAQTDR | |
| HLA00404) | VNLRKLRGYYNQSEAGSHTLQRMYGCDLGPDG | |
| * Predicted signal | RLLRGYDQSAYDGKDYIALNEDLRSWTAADTA | |
| peptide underlined | AQITQRKWEAAREAEQWRAYLEGECVEWLRRY | |
| | LENGKETLQRAEHPKTHVTHHPVSDHEATLRCW | |
| | ALGFYPTEITLTWQRDGEDQTQDTELVETRPAGD | |
| | GTFQKWAAVVVPSGEEQRYTCHVQHEGLPEPLT | |
| | LRWEPSSQPTIPIVGIVAGLAVLAVLAVLGAVVA | |
| | VVMCRRKSSGGKGGSCSQAASSNSAQGSDESLI | |
| | ACKA | |
| C*16:01 | MRVMAPRTLILLLSGALALTETWACSHSMRYFY | (SEQ ID NO: |
| (IMGT/HLA | TAVSRPGRGEPRFIAVGYVDDTQFVRFDSDAASP | 762) |
| Accession No. | RGEPRAPWVEQEGPEYWDRETQKYKRQAQTDR | |
| HLA00475) | VSLRNLRGYYNQSEAGSHTLQWMYGCDLGPDG | |
| * Predicted signal | RLLRGYDQSAYDGKDYIALNEDLRSWTAADTA | |
| peptide underlined | AQITQRKWEAARAAEQQRAYLEGTCVEWLRRY | |
| | LENGKETLQRAEHPKTHVTHHLVSDHEATLRCW | |
| | ALGFYPAEITLTWQRDGEDQTQDTELVETRPAG | |
| | DGTFQKWAAVVVPSGEEQRYTCHVQHEGLPEPL | |
| | TLRWEPSSQPTIPIVGIVAGLAVLAVLAVLGAVV | |
| | AVVMCRRKSSGGKGGSCSQAASSNSAQGSDESL | |
| | IACKA | |
| C*08:02 | MRVMAPRTLILLLSGALALTETWACSHSMRYFY | (SEQ ID NO: |
| (IMGT/HLA | TAVSRPGRGEPRFIAVGYVDDTQFVQFDSDAASP | 763) |
| Accession No. | RGEPRAPWVEQEGPEYWDRETQKYKRQAQTDR | |
| HLA00446) | VSLRNLRGYYNQSEAGSHTLQRMYGCDLGPDG | |
| * Predicted signal | RLLRGYNQFAYDGKDYIALNEDLRSWTAADKA | |
| peptide underlined | AQITQRKWEAAREAEQRRAYLEGTCVEWLRRY | |
| | LENGKKTLQRAEHPKTHVTHHPVSDHEATLRCW | |
| | ALGFYPAEITLTWQRDGEDQTQDTELVETRPAG | |
| | DGTFQKWAAVVVPSGEEQRYTCHVQHEGLPEPL | |
| | TLRWGPSSQPTIPIVGIVAGLAVLAVLAVLGAVM | |
| | AVVMCRRKSSGGKGGSCSQAASSNSAQGSDESL | |
| | IACKA | |
| C*12:03 | MRVMAPRTLILLLSGALALTETWACSHSMRYFY | (SEQ ID NO: |
| (IMGT/HLA | TAVSRPGRGEPRFIAVGYVDDTQFVRFDSDAASP | 764) |
| Accession No. | RGEPRAPWVEQEGPEYWDRETQKYKRQAQADR | |
| HLA00455) | VSLRNLRGYYNQSEAGSHTLQWMYGCDLGPDG | |
| * Predicted signal | RLLRGYDQSAYDGKDYIALNEDLRSWTAADTA | |
| peptide underlined | AQITQRKWEAAREAEQWRAYLEGTCVEWLRRY | |
| | LENGKETLQRAEHPKTHVTHHPVSDHEATLRCW | |
| | ALGFYPAEITLTWQRDGEDQTQDTELVETRPAG | |
| | DGTFQKWAAVVVPSGEEQRYTCHVQHEGLPEPL | |
| | TLRWEPSSQPTIPIVGIVAGLAVLAVLAVLGAVM | |
| | AVVMCRRKSSGGKGGSCSQAASSNSAQGSDESL | |
| | IACKA | |
| C*01:02 | MRVMAPRTLILLLSGALALTETWACSHSMKYFF | (SEQ ID NO: |
| (IMGT/HLA | TSVSRPGRGEPRFISVGYVDDTQFVRFDSDAASP | 765) |
| Accession No. | RGEPRAPWVEQEGPEYWDRETQKYKRQAQTDR | |
| HLA00401) | VSLRNLRGYYNQSEAGSHTLQWMCGCDLGPDG | |
| * Predicted signal | RLLRGYDQYAYDGKDYIALNEDLRSWTAADTA | |
| peptide underlined | AQITQRKWEAAREAEQRRAYLEGTCVEWLRRY | |
| | LENGKETLQRAEHPKTHVTHHPVSDHEATLRCW | |
| | ALGFYPAEITLTWQWDGEDQTQDTELVETRPAG | |
| | DGTFQKWAAVMVPSGEEQRYTCHVQHEGLPEP | |
| | LTLRWEPSSQPTIPIVGIVAGLAVLAVLAVLGAV | |
| | VAVVMCRRKSSGGKGGSCSQAASSNSAQGSDES | |
| | LIACKA | |
| C*15:02 | MRVMAPRTLLLLLSGALALTETWACSHSMRYFY | (SEQ ID NO: |
| (IMGT/HLA | TAVSRPGRGEPHFIAVGYVDDTQFVRFDSDAASP | 766) |
| Accession No. | RGEPRAPWVEQEGPEYWDRETQNYKRQAQTDR | |
| HLA00467) | VNLRKLRGYYNQSEAGSHIIQRMYGCDLGPDGR | |
| * Predicted signal | LLRGHDQLAYDGKDYIALNEDLRSWTAADTAA | |
| peptide underlined | QITQRKWEAAREAEQLRAYLEGTCVEWLRRYLE | |
| | NGKETLQRAEHPKTHVTHHPVSDHEATLRCWAL | |
| | GFYPAEITLTWQRDGEDQTQDTELVETRPAGDG | |
| | TFQKWAAVVVPSGEEQRYTCHVQHEGLPEPLTL | |
| | RWEPSSQPTIPIVGIVAGLAVLAVLAVLGAVMAV | |
| | VMCRRKSSGGKGGSCSQAASSNSAQGSDESLIAC | |
| | KA | |
| C*07:04 | MRVMAPRALLLLLSGGLALTETWACSHSMRYF | (SEQ ID NO: |
| (IMGT/HLA | DTAVSRPGRGEPRFISVGYVDDTQFVRFDSDAAS | 767) |
| Accession No. | PRGEPRAPWVEQEGPEYWDRETQKYKRQAQAD | |
| HLA00406) | RVSLRNLRGYYNQSEDGSHTFQRMYGCDLGPDG | |
| * Predicted signal | RLLRGYDQFAYDGKDYIALNEDLRSWTAADTA | |
| peptide underlined | AQITQRKLEAARAAEQDRAYLEGTCVEWLRRYL | |
| | ENGKKTLQRAEPPKTHVTHHPLSDHEATLRCWA | |
| | LGFYPAEITLTWQRDGEDQTQDTELVETRPAGD | |
| | GTFQKWAAVVVPSGQEQRYTCHMQHEGLQEPL | |
| | TLSWEPSSQPTIPIMGIVAGLAVLVVLAVLGAVV | |
| | TAMMCRRKSSGGKGGSCSQAACSNSAQGSDESL | |
| | ITCKA | |
| C*14:02 | MRVMAPRTLILLLSGALALTETWACSHSMRYFS | (SEQ ID NO: |
| (IMGT/HLA | TSVSRPGRGEPRFIAVGYVDDTQFVRFDSDAASP | 768) |
| Accession No. | RGEPRAPWVEQEGPEYWDRETQKYKRQAQTDR | |
| HLA00462) | VSLRNLRGYYNQSEAGSHTLQWMFGCDLGPDG | |
| * Predicted signal | RLLRGYDQSAYDGKDYIALNEDLRSWTAADTA | |
| peptide underlined | AQITQRKWEAAREAEQRRAYLEGTCVEWLRRY | |
| | LENGKETLQRAEHPKTHVTHHPVSDHEATLRCW | |
| | ALGFYPAEITLTWQWDGEDQTQDTELVETRPAG | |
| | DGTFQKWAAVVVPSGEEQRYTCHVQHEGLPEPL | |
| | TLRWEPSSQPTIPIVGIVAGLAVLAVLAVLGAVV | |
| | AVVMCRRKSSGGKGGSCSQAASSNSAQGSDESL | |
| | IACKA | |
| B*08:01 | MLVMAPRTVLLLLSAALALTETWAGSHSMRYF | (SEQ ID NO: |
| (IMGT/HLA | DTAMSRPGRGEPRFISVGYVDDTQFVRFDSDAAS | 769) |
| Accession No. | PREEPRAPWIEQEGPEYWDRNTQIFKTNTQTDRE | |
| HLA00146) | SLRNLRGYYNQSEAGSHTLQSMYGCDVGPDGRL | |
| * Predicted signal | LRGHNQYAYDGKDYIALNEDLRSWTAADTAAQI | |
| peptide underlined | TQRKWEAARVAEQDRAYLEGTCVEWLRRYLEN | |
| | GKDTLERADPPKTHVTHHPISDHEATLRCWALG | |
| | FYPAEITLTWQRDGEDQTQDTELVETRPAGDRTF | |
| | QKWAAVVVPSGEEQRYTCHVQHEGLPKPLTLR | |
| | WEPSSQSTVPIVGIVAGLAVLAVVVIGAVVAAV | |
| | MCRRKSSGGKGGSYSQAACSDSAQGSDVSLTA | |
| B*07:02 | MLVMAPRTVLLLLSAALALTETWAGSHSMRYF | (SEQ ID NO: |
| (IMGT/HLA | YTSVSRPGRGEPRFISVGYVDDTQFVRFDSDAAS | 770) |
| Accession No. | PREEPRAPWIEQEGPEYWDRNTQIYKAQAQTDR | |
| HLA00132) | ESLRNLRGYYNQSEAGSHTLQSMYGCDVGPDGR | |
| * Predicted signal | LLRGHDQYAYDGKDYIALNEDLRSWTAADTAA | |
| peptide underlined | QITQRKWEAAREAEQRRAYLEGECVEWLRRYLE | |
| | NGKDKLERADPPKTHVTHHPISDHEATLRCWAL | |
| | GFYPAEITLTWQRDGEDQTQDTELVETRPAGDR | |
| | TFQKWAAVVVPSGEEQRYTCHVQHEGLPKPLTL | |
| | RWEPSSQSTVPIVGIVAGLAVLAVVVIGAVVAAV | |
| | MCRRKSSGGKGGSYSQAACSDSAQGSDVSLTA | |
| B*44:02 | MRVTAPRTLLLLLWGAVALTETWAGSHSMRYF | (SEQ ID NO: |
| (IMGT/HLA | YTAMSRPGRGEPRFITVGYVDDTLFVRFDSDATS | 771) |
| Accession No. | PRKEPRAPWIEQEGPEYWDRETQISKTNTQTYRE | |
| HLA00318) | NLRTALRYYNQSEAGSHIIQRMYGCDVGPDGRL | |
| * Predicted signal | LRGYDQDAYDGKDYIALNEDLSSWTAADTAAQI | |
| peptide underlined | TQRKWEAARVAEQDRAYLEGLCVESLRRYLEN | |
| | GKETLQRADPPKTHVTHHPISDHEVTLRCWALG | |
| | FYPAEITLTWQRDGEDQTQDTELVETRPAGDRTF | |
| | QKWAAVVVPSGEEQRYTCHVQHEGLPKPLTLR | |
| | WEPSSQSTVPIVGIVAGLAVLAVVVIGAVVAAV | |
| | MCRRKSSGGKGGSYSQAACSDSAQGSDVSLTA | |
| B*15:01 | MRVTAPRTVLLLLSGALALTETWAGSHSMRYFY | (SEQ ID NO: |
| (IMGT/HLA | TAMSRPGRGEPRFIAVGYVDDTQFVRFDSDAASP | 772) |
| Accession No. | RMAPRAPWIEQEGPEYWDRETQISKTNTQTYRES | |
| HLA00162) | LRNLRGYYNQSEAGSHTLQRMYGCDVGPDGRL | |
| * Predicted signal | LRGHDQSAYDGKDYIALNEDLSSWTAADTAAQI | |
| peptide underlined | TQRKWEAAREAEQWRAYLEGLCVEWLRRYLEN | |
| | GKETLQRADPPKTHVTHHPISDHEATLRCWALG | |
| | FYPAEITLTWQRDGEDQTQDTELVETRPAGDRTF | |
| | QKWAAVVVPSGEEQRYTCHVQHEGLPKPLTLR | |
| | WEPSSQSTIPIVGIVAGLAVLAVVVIGAVVATVM | |
| | CRRKSSGGKGGSYSQAASSDSAQGSDVSLTA | |
| B*40:01 | MRVTAPRTVLLLLSAALALTETWAGSHSMRYFH | (SEQ ID NO: |
| (IMGT/HLA | TAMSRPGRGEPRFITVGYVDDTLFVRFDSDATSP | 773) |
| Accession No. | RKEPRAPWIEQEGPEYWDRETQISKTNTQTYRES | |
| HLA00291) | LRNLRGYYNQSEAGSHTLQRMYGCDVGPDGRL | |
| * Predicted signal | LRGHNQYAYDGKDYIALNEDLRSWTAADTAAQI | |
| peptide underlined | SQRKLEAARVAEQLRAYLEGECVEWLRRYLENG | |
| | KDKLERADPPKTHVTHHPISDHEATLRCWALGF | |
| | YPAEITLTWQRDGEDQTQDTELVETRPAGDRTF | |
| | QKWAAVVVPSGEEQRYTCHVQHEGLPKPLTLR | |
| | WEPSSQSTVPIVGIVAGLAVLAVVVIGAVVAAV | |
| | MCRRKSSGGKGGSYSQAACSDSAQGSDVSLTA | |
| B*44:03 | MRVTAPRTLLLLLWGAVALTETWAGSHSMRYF | (SEQ ID NO: |
| (IMGT/HLA | YTAMSRPGRGEPRFITVGYVDDTLFVRFDSDATS | 774) |
| Accession No. | PRKEPRAPWIEQEGPEYWDRETQISKTNTQTYRE | |
| HLA00319) | NLRTALRYYNQSEAGSHIIQRMYGCDVGPDGRL | |
| * Predicted signal | LRGYDQDAYDGKDYIALNEDLSSWTAADTAAQI | |
| peptide underlined | TQRKWEAARVAEQLRAYLEGLCVESLRRYLENG | |
| | KETLQRADPPKTHVTHHPISDHEVTLRCWALGF | |
| | YPAEITLTWQRDGEDQTQDTELVETRPAGDRTF | |
| | QKWAAVVVPSGEEQRYTCHVQHEGLPKPLTLR | |
| | WEPSSQSTVPIVGIVAGLAVLAVVVIGAVVAAV | |
| | MCRRKSSGGKGGSYSQAACSDSAQGSDVSLTA | |
| B*35:01 | MRVTAPRTVLLLLWGAVALTETWAGSHSMRYF | (SEQ ID NO: |
| (IMGT/HLA | YTAMSRPGRGEPRFIAVGYVDDTQFVRFDSDAA | 775) |
| Accession No. | SPRTEPRAPWIEQEGPEYWDRNTQIFKTNTQTYR | |
| HLA00237) | ESLRNLRGYYNQSEAGSHIIQRMYGCDLGPDGRL | |
| * Predicted signal | LRGHDQSAYDGKDYIALNEDLSSWTAADTAAQI | |
| peptide underlined | TQRKWEAARVAEQLRAYLEGLCVEWLRRYLEN | |
| | GKETLQRADPPKTHVTHHPVSDHEATLRCWALG | |
| | FYPAEITLTWQRDGEDQTQDTELVETRPAGDRTF | |
| | QKWAAVVVPSGEEQRYTCHVQHEGLPKPLTLR | |
| | WEPSSQSTIPIVGIVAGLAVLAVVVIGAVVATVM | |
| | CRRKSSGGKGGSYSQAASSDSAQGSDVSLTA | |
| B*51:01 | MRVTAPRTVLLLLWGAVALTETWAGSHSMRYF | (SEQ ID NO: |
| (IMGT/HLA | YTAMSRPGRGEPRFIAVGYVDDTQFVRFDSDAA | 776) |
| Accession No. | SPRTEPRAPWIEQEGPEYWDRNTQIFKTNTQTYR | |
| HLA00344) | ENLRIALRYYNQSEAGSHTWQTMYGCDVGPDG | |
| * Predicted signal | RLLRGHNQYAYDGKDYIALNEDLSSWTAADTA | |
| peptide underlined | AQITQRKWEAAREAEQLRAYLEGLCVEWLRRHL | |
| | ENGKETLQRADPPKTHVTHHPVSDHEATLRCWA | |
| | LGFYPAEITLTWQRDGEDQTQDTELVETRPAGD | |
| | RTFQKWAAVVVPSGEEQRYTCHVQHEGLPKPLT | |
| | LRWEPSSQSTIPIVGIVAGLAVLAVVVIGAVVAT | |
| | VMCRRKSSGGKGGSYSQAASSDSAQGSDVSLTA | |
| B*27:05 | MRVTAPRTLLLLLWGAVALTETWAGSHSMRYF | (SEQ ID NO: |
| (IMGT/HLA | HTSVSRPGRGEPRFITVGYVDDTLFVRFDSDAAS | 777) |
| Accession No. | PREEPRAPWIEQEGPEYWDRETQICKAKAQTDRE | |
| HLA00225) | DLRTLLRYYNQSEAGSHTLQNMYGCDVGPDGR | |
| * Predicted signal | LLRGYHQDAYDGKDYIALNEDLSSWTAADTAA | |
| peptide underlined | QITQRKWEAARVAEQLRAYLEGECVEWLRRYLE | |
| | NGKETLQRADPPKTHVTHHPISDHEATLRCWAL | |
| | GFYPAEITLTWQRDGEDQTQDTELVETRPAGDR | |
| | TFQKWAAVVVPSGEEQRYTCHVQHEGLPKPLTL | |
| | RWEPSSQSTVPIVGIVAGLAVLAVVVIGAVVAAV | |
| | MCRRKSSGGKGGSYSQAACSDSAQGSDVSLTA | |
| B*57:01 | MRVTAPRTVLLLLWGAVALTETWAGSHSMRYF | (SEQ ID NO: |
| (IMGT/HLA | YTAMSRPGRGEPRFIAVGYVDDTQFVRFDSDAA | 778) |
| Accession No. | SPRMAPRAPWIEQEGPEYWDGETRNMKASAQT | |
| HLA00381) | YRENLRIALRYYNQSEAGSHIIQVMYGCDVGPD | |
| * Predicted signal | GRLLRGHDQSAYDGKDYIALNEDLSSWTAADTA | |
| peptide underlined | AQITQRKWEAARVAEQLRAYLEGLCVEWLRRY | |
| | LENGKETLQRADPPKTHVTHHPISDHEATLRCW | |
| | ALGFYPAEITLTWQRDGEDQTQDTELVETRPAG | |
| | DRTFQKWAAVVVPSGEEQRYTCHVQHEGLPKPL | |
| | TLRWEPSSQSTVPIVGIVAGLAVLAVVVIGAVVA | |
| | AVMCRRKSSGGKGGSYSQAACSDSAQGSDVSLTA | |
| B*18:01 | MRVTAPRTLLLLLWGAVALTETWAGSHSMRYF | (SEQ ID NO: |
| (IMGT/HLA | HTSVSRPGRGEPRFISVGYVDGTQFVRFDSDAAS | 779) |
| Accession No. | PRTEPRAPWIEQEGPEYWDRNTQISKTNTQTYRE | |
| HLA00213) | SLRNLRGYYNQSEAGSHTLQRMYGCDVGPDGR | |
| * Predicted signal | LLRGHDQSAYDGKDYIALNEDLSSWTAADTAAQ | |
| peptide underlined | ITQRKWEAARVAEQLRAYLEGTCVEWLRRHLEN | |
| | GKETLQRADPPKTHVTHHPISDHEATLRCWALG | |
| | FYPAEITLTWQRDGEDQTQDTELVETRPAGDRTF | |
| | QKWAAVVVPSGEEQRYTCHVQHEGLPKPLTLR | |
| | WEPSSQSTIPIVGIVAGLAVLAVVVIGAVVATVM | |
| | CRRKSSGGKGGSYSQAASSDSAQGSDVSLTA | |
| B*14:02 | MLVMAPRTVLLLLSAALALTETWAGSHSMRYF | (SEQ ID NO: |
| (IMGT/HLA | YTAVSRPGRGEPRFISVGYVDDTQFVRFDSDAAS | 780) |
| Accession No. | PREEPRAPWIEQEGPEYWDRNTQICKTNTQTDRE | |
| HLA00158) | SLRNLRGYYNQSEAGSHTLQWMYGCDVGPDGR | |
| * Predicted signal | LLRGYNQFAYDGKDYIALNEDLSSWTAADTAAQ | |
| peptide underlined | ITQRKWEAAREAEQLRAYLEGTCVEWLRRHLEN | |
| | GKETLQRADPPKTHVTHHPISDHEATLRCWALG | |
| | FYPAEITLTWQRDGEDQTQDTELVETRPAGDRTF | |
| | QKWAAVVVPSGEEQRYTCHVQHEGLPKPLTLR | |
| | WEPSSQSTVPIVGIVAGLAVLAVVVIGAVVAAV | |
| | MCRRKSSGGKGGSYSQAASSDSAQGSDVSLTA | |
| B*13:02 | MRVTAPRTLLLLLWGAVALTETWAGSHSMRYF | (SEQ ID NO: |
| (IMGT/HLA | YTAMSRPGRGEPRFITVGYVDDTQFVRFDSDATS | 781) |
| Accession No. | PRMAPRAPWIEQEGPEYWDRETQISKTNTQTYRE | |
| HLA00153) | NLRTALRYYNQSEAGSHTWQTMYGCDLGPDGR | |
| * Predicted signal | LLRGHNQLAYDGKDYIALNEDLSSWTAADTAA | |
| peptide underlined | QITQLKWEAARVAEQLRAYLEGECVEWLRRYLE | |
| | NGKETLQRADPPKTHVTHHPISDHEATLRCWAL | |
| | GFYPAEITLTWQRDGEDQTQDTELVETRPAGDR | |
| | TFQKWAAVVVPSGEEQRYTCHVQHEGLPKPLTL | |
| | RWEPSSQSTVPIVGIVAGLAVLAVVVIGAVVAAV | |
| | MCRRKSSGGKGGSYSQAACSDSAQGSDVSLTA | |
| B*55:01 | MRVTAPRTLLLLLWGALALTETWAGSHSMRYF | (SEQ ID NO: |
| (IMGT/HLA | YTAMSRPGRGEPRFIAVGYVDDTQFVRFDSDAA | 782) |
| Accession No. | SPREEPRAPWIEQEGPEYWDRNTQIYKAQAQTD | |
| HLA00368) | RESLRNLRGYYNQSEAGSHTWQTMYGCDLGPD | |
| * Predicted signal | GRLLRGHNQLAYDGKDYIALNEDLSSWTAADTA | |
| peptide underlined | AQITQRKWEAAREAEQLRAYLEGTCVEWLRRYL | |
| | ENGKETLQRADPPKTHVTHHPISDHEATLRCWA | |
| | LGFYPAEITLTWQRDGEDQTQDTELVETRPAGD | |
| | RTFQKWAAVVVPSGEEQRYTCHVQHEGLPKPLT | |
| | LRWEPSSQSTIPIVGIVAGLAVLAVVVIGAVVAT | |
| | VMCRRKSSGGKGGSYSQAASSDSAQGSDVSLTA | |
| B*14:01 | MLVMAPRTVLLLLSAALALTETWAGSHSMRYF | (SEQ ID NO: |
| (IMGT/HLA | YTSVSRPGRGEPRFISVGYVDDTQFVRFDSDAAS | 783) |
| Accession No. | PREEPRAPWIEQEGPEYWDRNTQICKTNTQTDRE | |
| HLA00157) | SLRNLRGYYNQSEAGSHTLQWMYGCDVGPDGR | |
| * Predicted signal | LLRGYNQFAYDGKDYIALNEDLSSWTAADTAAQ | |
| peptide underlined | ITQRKWEAAREAEQLRAYLEGTCVEWLRRHLEN | |
| | GKETLQRADPPKTHVTHHPISDHEATLRCWALG | |
| | FYPAEITLTWQRDGEDQTQDTELVETRPAGDRTF | |
| | QKWAAVVVPSGEEQRYTCHVQHEGLPKPLTLR | |
| | WEPSSQSTVPIVGIVAGLAVLAVVVIGAVVAAV | |
| | MCRRKSSGGKGGSYSQAASSDSAQGSDVSLTA | |
| B*49:01 | MRVTAPRTVLLLLSAALALTETWAGSHSMRYFH | (SEQ ID NO: |
| (IMGT/HLA | TAMSRPGRGEPRFITVGYVDDTLFVRFDSDATSP | 784) |
| Accession No. | RKEPRAPWIEQEGPEYWDRETQISKTNTQTYREN | |
| HLA00340) | LRIALRYYNQSEAGSHTWQRMYGCDLGPDGRLL | |
| * Predicted signal | RGYNQLAYDGKDYIALNEDLSSWTAADTAAQIT | |
| peptide underlined | QRKWEAAREAEQLRAYLEGLCVEWLRRYLENG | |
| | KETLQRADPPKTHVTHHPISDHEATLRCWALGF | |
| | YPAEITLTWQRDGEDQTQDTELVETRPAGDRTF | |
| | QKWAAVVVPSGEEQRYTCHVQHEGLPKPLTLR | |
| | WEPSSQSTIPIVGIVAGLAVLAVVVIGAVVATVM | |
| | CRRKSSGGKGGSYSQAASSDSAQGSDVSLTA | |
| B*37:01 | MRVTAPRTLLLLLWGAVALTETWAGSHSMRYF | (SEQ ID NO: |
| (IMGT/HLA | HTSVSRPGRGEPRFISVGYVDDTQFVRFDSDAAS | 785) |
| Accession No. | PRTEPRAPWIEQEGPEYWDRETQISKTNTQTYRE | |
| HLA00265) | DLRTLLRYYNQSEAGSHTIQRMSGCDVGPDGRL | |
| * Predicted signal | LRGYNQFAYDGKDYIALNEDLSSWTAADTAAQI | |
| peptide underlined | TQRKWEAARVAEQDRAYLEGTCVEWLRRYLEN | |
| | GKETLQRADPPKTHVTHHPISDHEATLRCWALG | |
| | FYPAEITLTWQRDGEDQTQDTELVETRPAGDRTF | |
| | QKWAAVVVPSGEEQRYTCHVQHEGLPKPLTLR | |
| | WEPSSQSTIPIVGIVAGLAVLAVVVIGAVVATVM | |
| | CRRKSSGGKGGSYSQAASSDSAQGSDVSLTA | |
| B*38:01 | MLVMAPRTVLLLLSAALALTETWAGSHSMRYF | (SEQ ID NO: |
| (IMGT/HLA | YTSVSRPGRGEPRFISVGYVDDTQFVRFDSDAAS | 786) |
| Accession No. | PREEPRAPWIEQEGPEYWDRNTQICKTNTQTYRE | |
| HLA00267) | NLRIALRYYNQSEAGSHTLQRMYGCDVGPDGRL | |
| * Predicted signal | LRGHNQFAYDGKDYIALNEDLSSWTAADTAAQI | |
| peptide underlined | TQRKWEAARVAEQLRTYLEGTCVEWLRRYLEN | |
| | GKETLQRADPPKTHVTHHPISDHEATLRCWALG | |
| | FYPAEITLTWQRDGEDQTQDTELVETRPAGDRTF | |
| | QKWAAVVVPSGEEQRYTCHVQHEGLPKPLTLR | |
| | WEPSSQSTVPIVGIVAGLAVLAVVVIGAVVAAV | |
| | MCRRKSSGGKGGSYSQAASSDSAQGSDVSLTA | |
| B*39:01 | MLVMAPRTVLLLLSAALALTETWAGSHSMRYF | (SEQ ID NO: |
| (IMGT/HLA | YTSVSRPGRGEPRFISVGYVDDTQFVRFDSDAAS | 787) |
| Accession No. | PREEPRAPWIEQEGPEYWDRNTQICKTNTQTDRE | |
| HLA00271) | SLRNLRGYYNQSEAGSHTLQRMYGCDVGPDGR | |
| * Predicted signal | LLRGHNQFAYDGKDYIALNEDLSSWTAADTAAQ | |
| peptide underlined | ITQRKWEAARVAEQLRTYLEGTCVEWLRRYLEN | |
| | GKETLQRADPPKTHVTHHPISDHEATLRCWALG | |
| | FYPAEITLTWQRDGEDQTQDTELVETRPAGDRTF | |
| | QKWAAVVVPSGEEQRYTCHVQHEGLPKPLTLR | |
| | WEPSSQSTVPIVGIVAGLAVLAVVVIGAVVAAV | |
| | MCRRKSSGGKGGSYSQAASSDSAQGSDVSLTA | |
| B*35:03 | MRVTAPRTVLLLLWGAVALTETWAGSHSMRYF | (SEQ ID NO: |
| (IMGT/HLA | YTAMSRPGRGEPRFIAVGYVDDTQFVRFDSDAA | 788) |
| Accession No. | SPRTEPRAPWIEQEGPEYWDRNTQIFKTNTQTYR | |
| HLA00239) | ESLRNLRGYYNQSEAGSHIIQRMYGCDLGPDGRL | |
| * Predicted signal | LRGHDQFAYDGKDYIALNEDLSSWTAADTAAQI | |
| peptide underlined | TQRKWEAARVAEQLRAYLEGLCVEWLRRYLEN | |
| | GKETLQRADPPKTHVTHHPVSDHEATLRCWALG | |
| | FYPAEITLTWQRDGEDQTQDTELVETRPAGDRTF | |
| | QKWAAVVVPSGEEQRYTCHVQHEGLPKPLTLR | |
| | WEPSSQSTIPIVGIVAGLAVLAVVVIGAVVATVM | |
| | CRRKSSGGKGGSYSQAASSDSAQGSDVSLTA | |
| B*40:02 | MRVTAPRTLLLLLWGAVALTETWAGSHSMRYF | (SEQ ID NO: |
| (IMGT/HLA | HTSVSRPGRGEPRFITVGYVDDTLFVRFDSDATSP | 789) |
| Accession No. | RKEPRAPWIEQEGPEYWDRETQISKTNTQTYRES | |
| HLA00293) | LRNLRGYYNQSEAGSHTLQSMYGCDVGPDGRLL | |
| * Predicted signal | RGHNQYAYDGKDYIALNEDLRSWTAADTAAQIT | |
| peptide underlined | QRKWEAARVAEQLRAYLEGECVEWLRRYLENG | |
| | KETLQRADPPKTHVTHHPISDHEATLRCWALGF | |
| | YPAEITLTWQRDGEDQTQDTELVETRPAGDRTF | |
| | QKWAAVVVPSGEEQRYTCHVQHEGLPKPLTLR | |
| | WEPSSQSTVPIVGIVAGLAVLAVVVIGAVVAAV | |
| | MCRRKSSGGKGGSYSQAACSDSAQGSDVSLTA | |
| DRB1*07:01 | MVCLKLPGGSCMAALTVTLMVLSSPLALAGDTQ | (SEQ ID NO: |
| (IMGT/HLA | PRFLWQGKYKCHFFNGTERVQFLERLFYNQEEF | 790) |
| Accession No. | VRFDSDVGEYRAVTELGRPVAESWNSQKDILED | |
| HLA00719) | RRGQVDTVCRHNYGVGESFTVQRRVHPEVTVYP | |
| * Predicted signal | AKTQPLQHHNLLVCSVSGFYPGSIEVRWFRNGQ | |
| peptide underlined | EEKAGVVSTGLIQNGDWTFQTLVMLETVPRSGE | |
| | VYTCQVEHPSVMSPLTVEWRARSESAQSKMLSG | |
| | VGGFVLGLLFLGAGLFIYFRNQKGHSGLQPTGFLS | |
| DRB1*03:01 | MVCLRLPGGSCMAVLTVTLMVLSSPLALAGDTR | (SEQ ID NO: |
| (IMGT/HLA | PRFLEYSTSECHFFNGTERVRYLDRYFHNQEENV | 791) |
| Accession No. | RFDSDVGEFRAVTELGRPDAEYWNSQKDLLEQK | |
| HLA00671) | RGRVDNYCRHNYGVVESFTVQRRVHPKVTVYPS | |
| * Predicted signal | KTQPLQHHNLLVCSVSGFYPGSIEVRWFRNGQEE | |
| peptide underlined | KTGVVSTGLIHNGDWTFQTLVMLETVPRSGEVY | |
| | TCQVEHPSVTSPLTVEWRARSESAQSKMLSGVG | |
| | GFVLGLLFLGAGLFIYFRNQKGHSGLQPRGFLS | |
| DRB1*15:01 | MVCLKLPGGSCMTALTVTLMVLSSPLALSGDTR | (SEQ ID NO: |
| (IMGT/HLA | PRFLWQPKRECHFFNGTERVRFLDRYFYNQEESV | 792) |
| Accession No. | RFDSDVGEFRAVTELGRPDAEYWNSQKDILEQA | |
| HLA00865) | RAAVDTYCRHNYGVVESFTVQRRVQPKVTVYPS | |
| * Predicted signal | KTQPLQHHNLLVCSVSGFYPGSIEVRWFLNGQEE | |
| peptide underlined | KAGMVSTGLIQNGDWTFQTLVMLETVPRSGEVY | |
| | TCQVEHPSVTSPLTVEWRARSESAQSKMLSGVG | |
| | GFVLGLLFLGAGLFIYFRNQKGHSGLQPTGFLS | |
| DRB1*04:01 | MVCLKFPGGSCMAALTVTLMVLSSPLALAGDTR | (SEQ ID NO: |
| (IMGT/HLA | PRFLEQVKHECHFFNGTERVRFLDRYFYHQEEY | 793) |
| Accession No. | VRFDSDVGEYRAVTELGRPDAEYWNSQKDLLEQ | |
| HLA00685) | KRAAVDTYCRHNYGVGESFTVQRRVYPEVTVYP | |
| * Predicted signal | AKTQPLQHHNLLVCSVNGFYPGSIEVRWFRNGQ | |
| peptide underlined | EEKTGVVSTGLIQNGDWTFQTLVMLETVPRSGE | |
| | VYTCQVEHPSLTSPLTVEWRARSESAQSKMLSG | |
| | VGGFVLGLLFLGAGLFIYFRNQKGHSGLQPTGFLS | |
| DRB1*01:01 | MVCLKLPGGSCMTALTVTLMVLSSPLALAGDTR | (SEQ ID NO: |
| (IMGT/HLA | PRFLWQLKFECHFFNGTERVRLLERCIYNQEESV | 794) |
| Accession No. | RFDSDVGEYRAVTELGRPDAEYWNSQKDLLEQR | |
| HLA00664) | RAAVDTYCRHNYGVGESFTVQRRVEPKVTVYPS | |
| * Predicted signal | KTQPLQHHNLLVCSVSGFYPGSIEVRWFRNGQEE | |
| peptide underlined | KAGVVSTGLIQNGDWTFQTLVMLETVPRSGEVY | |
| | TCQVEHPSVTSPLTVEWRARSESAQSKMLSGVG | |
| | GFVLGLLFLGAGLFIYFRNQKGHSGLQPTGFLS | |
| DRB1*13:01 | MVCLRLPGGSCMAVLTVTLMVLSSPLALAGDTR | (SEQ ID NO: |
| (IMGT/HLA | PRFLEYSTSECHFFNGTERVRFLDRYFHNQEENV | 795) |
| Accession No. | RFDSDVGEFRAVTELGRPDAEYWNSQKDILEDE | |
| HLA00797) | RAAVDTYCRHNYGVVESFTVQRRVHPKVTVYPS | |
| * Predicted signal | KTQPLQHHNLLVCSVSGFYPGSIEVRWFRNGQEE | |
| peptide underlined | KTGVVSTGLIHNGDWTFQTLVMLETVPRSGEVY | |
| | TCQVEHPSVTSPLTVEWRARSESAQSKMLSGVG | |
| | GFVLGLLFLGAGLFIYFRNQKGHSGLQPRGFLS | |
| DRB1*11:01 | MVCLRLPGGSCMAVLTVTLMVLSSPLALAGDTR | (SEQ ID NO: |
| (IMGT/HLA | PRFLEYSTSECHFFNGTERVRFLDRYFYNQEEYV | 796) |
| Accession No. | RFDSDVGEFRAVTELGRPDEEYWNSQKDFLEDR | |
| HLA00751) | RAAVDTYCRHNYGVGESFTVQRRVHPKVTVYPS | |
| * Predicted signal | KTQPLQHHNLLVCSVSGFYPGSIEVRWFRNGQEE | |
| peptide underlined | KTGVVSTGLIHNGDWTFQTLVMLETVPRSGEVY | |
| | TCQVEHPSVTSPLTVEWRARSESAQSKMLSGVG | |
| | GFVLGLLFLGAGLFIYFRNQKGHSGLQPRGFLS | |
| DRB1*04:04 | MVCLKFPGGSCMAALTVTLMVLSSPLALAGDTR | (SEQ ID NO: |
| (IMGT/HLA | PRFLEQVKHECHFFNGTERVRFLDRYFYHQEEY | 797) |
| Accession No. | VRFDSDVGEYRAVTELGRPDAEYWNSQKDLLEQ | |
| HLA00689) | RRAAVDTYCRHNYGVVESFTVQRRVYPEVTVYP | |
| * Predicted signal | AKTQPLQHHNLLVCSVNGFYPGSIEVRWFRNGQ | |
| peptide underlined | EEKTGVVSTGLIQNGDWTFQTLVMLETVPRSGE | |
| | VYTCQVEHPSLTSPLTVEWRARSESAQSKMLSG | |
| | VGGFVLGLLFLGAGLFIYFRNQKGHSGLQPTGFLS | |
| DRB1*13:02 | MVCLRLPGGSCMAVLTVTLMVLSSPLALAGDTR | (SEQ ID NO: |
| (IMGT/HLA | PRFLEYSTSECHFFNGTERVRFLDRYFHNQEENV | 798) |
| Accession No. | RFDSDVGEFRAVTELGRPDAEYWNSQKDILEDE | |
| HLA00798) | RAAVDTYCRHNYGVGESFTVQRRVHPKVTVYPS | |
| * Predicted signal | KTQPLQHHNLLVCSVSGFYPGSIEVRWFRNGQEE | |
| peptide underlined | KTGVVSTGLIHNGDWTFQTLVMLETVPRSGEVY | |
| | TCQVEHPSVTSPLTVEWRARSESAQSKMLSGVG | |
| | GFVLGLLFLGAGLFIYFRNQKGHSGLQPRGFLS | |
| DRB1*08:01 | MVCLRLPGGSCMAVLTVTLMVLSSPLALAGDTR | (SEQ ID NO: |
| (IMGT/HLA | PRFLEYSTGECYFFNGTERVRFLDRYFYNQEEYV | 799) |
| Accession No. | RFDSDVGEYRAVTELGRPSAEYWNSQKDFLEDR | |
| HLA00723) | RALVDTYCRHNYGVGESFTVQRRVHPKVTVYPS | |
| * Predicted signal | KTQPLQHHNLLVCSVSGFYPGSIEVRWFRNGQEE | |
| peptide underlined | KTGVVSTGLIHNGDWTFQTLVMLETVPRSGEVY | |
| | TCQVEHPSVTSPLTVEWSARSESAQSKMLSGVG | |
| | GFVLGLLFLGAGLFIYFRNQKGHSGLQPTGFLS | |
| DRB1*12:01 | MVCLRLPGGSCMAVLTVTLMVLSSPLALAGDTR | (SEQ ID NO: |
| (IMGT/HLA | PRFLEYSTGECYFFNGTERVRLLERHFHNQEELL | 800) |
| Accession No. | RFDSDVGEFRAVTELGRPVAESWNSQKDILEDRR | |
| HLA00789) | AAVDTYCRHNYGAVESFTVQRRVHPKVTVYPSK | |
| * Predicted signal | TQPLQHHNLLVCSVSGFYPGSIEVRWFRNGQEEK | |
| peptide underlined | TGVVSTGLIHNGDWTFQTLVMLETVPRSGEVYT | |
| | CQVEHPSVTSPLTVEWRARSESAQSKMLSGVGG | |
| | FVLGLLFLGAGLFIYFRNQKGHSGLQPRGFLS | |
| DRB1*11:04 | MVCLRLPGGSCMAVLTVTLMVLSSPLALAGDTR | (SEQ ID NO: |
| (IMGT/HLA | PRFLEYSTSECHFFNGTERVRFLDRYFYNQEEYV | 801) |
| Accession No. | RFDSDVGEFRAVTELGRPDEEYWNSQKDFLEDR | |
| HLA00756) | RAAVDTYCRHNYGVVESFTVQRRVHPKVTVYPS | |
| * Predicted signal | KTQPLQHHNLLVCSVSGFYPGSIEVRWFRNGQEE | |
| peptide underlined | KTGVVSTGLIHNGDWTFQTLVMLETVPRSGEVY | |
| | TCQVEHPSVTSPLTVEWRARSESAQSKMLSGVG | |
| | GFVLGLLFLGAGLFIYFRNQKGHSGLQPRGFLS | |
| DRB1*09:01 | MVCLKLPGGSCMAALTVTLMVLSSPLALAGDTQ | (SEQ ID NO: |
| (IMGT/HLA | PRFLKQDKFECHFFNGTERVRYLHRGIYNQEENV | 802) |
| Accession No. | RFDSDVGEYRAVTELGRPVAESWNSQKDFLERR | |
| HLA00749) | RAEVDTVCRHNYGVGESFTVQRRVHPEVTVYPA | |
| * Predicted signal | KTQPLQHHNLLVCSVSGFYPGSIEVRWFRNGQEE | |
| peptide underlined | KAGVVSTGLIQNGDWTFQTLVMLETVPRSGEVY | |
| | TCQVEHPSVMSPLTVEWRARSESAQSKMLSGVG | |
| | GFVLGLLFLGAGLFIYFRNQKGHSGLQPTGFLS | |
| DRB1*14:01 | MVCLRLPGGSCMAVLTVTLMVLSSPLALAGDTR | (SEQ ID NO: |
| (IMGT/HLA | PRFLEYSTSECHFFNGTERVRFLDRYFHNQEEFV | 803) |
| Accession No. | RFDSDVGEYRAVTELGRPAAEHWNSQKDLLERR | |
| HLA00833) | RAEVDTYCRHNYGVVESFTVQRRVHPKVTVYPS | |
| * Predicted signal | KTQPLQHYNLLVCSVSGFYPGSIEVRWFRNGQEE | |
| peptide underlined | KTGVVSTGLIHNGDWTFQTLVMLETVPRSGEVY | |
| | TCQVEHPSVTSPLTVEWRARSESAQSKMLSGVG | |
| | GFVLGLLFLGAGLFIYFRNQKGHSGLQPRGFLS | |
| DRB1*04:07 | MVCLKFPGGSCMAALTVTLMVLSSPLALAGDTR | (SEQ ID NO: |
| (IMGT/HLA | PRFLEQVKHECHFFNGTERVRFLDRYFYHQEEY | 804) |
| Accession No. | VRFDSDVGEYRAVTELGRPDAEYWNSQKDLLEQ | |
| HLA00693) | RRAEVDTYCRHNYGVGESFTVQRRVYPEVTVYP | |
| * Predicted signal | AKTQPLQHHNLLVCSVNGFYPGSIEVRWFRNGQ | |
| peptide underlined | EEKTGVVSTGLIQNGDWTFQTLVMLETVPRSGE | |
| | VYTCQVEHPSLTSPLTVEWRARSESAQSKMLSG | |
| | VGGFVLGLLFLGAGLFIYFRNQKGHSGLQPTGFLS | |
| DRB1*14:04 | MVCLRLPGGSCMAVLTVTLMVLSSPLALAGDTR | (SEQ ID NO: |
| (IMGT/HLA | PRFLEYSTGECYFFNGTERVRFLDRYFHNQEEFV | 805) |
| Accession No. | RFDSDVGEYRAVTELGRPAAEHWNSQKDLLERR | |
| HLA00836) | RAEVDTYCRHNYGVVESFTVQRRVHPKVTVYPS | |
| * Predicted signal | KTQPLQHHNLLVCSVSGFYPGSIEVRWFRNGQEE | |
| peptide underlined | KTGVVSTGLIHNGDWTFQTLVMLETVPRSGEVY | |
| | TCQVEHPSVTSPLTVEWRARSESAQSKMLSGVG | |
| | GFVLGLLFLGAGLFIYFRNQKGHSGLQPRGFLS | |
| DQA1*05:01 | MILNKALMLGALALTTVMSPCGGEDIVADHVAS | (SEQ ID NO: |
| (IMGT/HLA | YGVNLYQSYGPSGQYTHEFDGDEQFYVDLGRKE | 806) |
| Accession No. | TVWCLPVLRQFRFDPQFALTNIAVLKHNLNSLIK | |
| HLA00613) | RSNSTAATNEVPEVTVFSKSPVTLGQPNILICLVD | |
| * Predicted signal | NIFPPVVNITWLSNGHSVTEGVSETSFLSKSDHSF | |
| peptide underlined | FKISYLTLLPSAEESYDCKVEHWGLDKPLLKHWE | |
| | PEIPAPMSELTETVVCALGLSVGLVGIVVGTVFII | |
| | RGLRSVGASRHQGPL | |
| DQA1*03:01 | MILNKALMLGALALTTVMSPCGGEDIVADHVAS | (SEQ ID NO: |
| (IMGT/HLA | YGVNLYQSYGPSGQYSHEFDGDEEFYVDLERKE | 807) |
| Accession No. | TVWQLPLFRRFRRFDPQFALTNIAVLKHNLNIVIK | |
| HLA00608) | RSNSTAATNEVPEVTVFSKSPVTLGQPNTLICLVD | |
| * Predicted signal | NIFPPVVNITWLSNGHSVTEGVSETSFLSKSDHSF | |
| peptide underlined | FKISYLTFLPSADEIYDCKVEHWGLDEPLLKHWE | |
| | PEIPTPMSELTETVVCALGLSVGLVGIVVGTVLIIR | |
| | GLRSVGASRHQGPL | |
| DQA1*01:02 | MILNKALLLGALALTTVMSPCGGEDIVADHVAS | (SEQ ID NO: |
| (IMGT/HLA | CGVNLYQFYGPSGQYTHEFDGDEQFYVDLERKE | 808) |
| Accession No. | TAWRWPEFSKFGGFDPQGALRNMAVAKHNLNI | |
| HLA00602) | MIKRYNSTAATNEVPEVTVFSKSPVTLGQPNTLI | |
| * Predicted signal | CLVDNIFPPVVNITWLSNGQSVTEGVSETSFLSKS | |
| peptide underlined | DHSFFKISYLTFLPSADEIYDCKVEHWGLDQPLL | |
| | KHWEPEIPAPMSELTETVVCALGLSVGLMGIVVG | |
| | TVFIIQGLRSVGASRHQGPL | |
| DQA1*02:01 | MILNKALMLGALALTTVMSPCGGEDIVADHVAS | (SEQ ID NO: |
| (IMGT/HLA | YGVNLYQSYGPSGQFTHEFDGDEEFYVDLERKE | 809) |
| Accession No. | TVWKLPLFHRLRFDPQFALTNIAVLKHNLNILIKR | |
| HLA00607) | SNSTAATNEVPEVTVFSKSPVTLGQPNTLICLVD | |
| * Predicted signal | NIFPPVVNITWLSNGHSVTEGVSETSFLSKSDHSF | |
| peptide underlined | FKISYLTFLPSADEIYDCKVEHWGLDEPLLKHWE | |
| | PEIPAPMSELTETVVCALGLSVGLVGIVVGTVLII | |
| | RGLRSVGASRHQGPL | |
| DQA1*01:01 | MILNKALLLGALALTTVMSPCGGEDIVADHVAS | (SEQ ID NO: |
| (IMGT/HLA | CGVNLYQFYGPSGQYTHEFDGDEEFYVDLERKE | 810) |
| Accession No. | TAWRWPEFSKFGGFDPQGALRNMAVAKHNLNI | |
| HLA00601) | MIKRYNSTAATNEVPEVTVFSKSPVTLGQPNTLI | |
| * Predicted signal | CLVDNIFPPVVNITWLSNGQSVTEGVSETSFLSKS | |
| peptide underlined | DHSFFKISYLTFLPSADEIYDCKVEHWGLDQPLL | |
| | KHWEPEIPAPMSELTETVVCALGLSVGLVGIVVG | |
| | TVFIIQGLRSVGASRHQGPL | |
| DQA1*01:03 | MILNKALLLGALALTTVMSPCGGEDIVADHVAS | (SEQ ID NO: |
| (IMGT/HLA | CGVNLYQFYGPSGQFTHEFDGDEQFYVDLEKKE | 811) |
| Accession No. | TAWRWPEFSKFGGFDPQGALRNMAVAKHNLNI | |
| HLA00604) | MIKRYNSTAATNEVPEVTVFSKSPVTLGQPNTLI | |
| * Predicted signal | CLVDNIFPPVVNITWLSNGHAVTEGVSETSFLSKS | |
| peptide underlined | DHSFFKISYLTFLPSADEIYDCKVEHWGLDQPLL | |
| | KHWEPEIPAPMSELTETVVCALGLSVGLVGIVVG | |
| | TVFIIQGLRSVGASRHQGPL | |
| DQA1*04:01 | MILNKALLLGALALTTVMSPCGGEDIVADHVAS | (SEQ ID NO: |
| (IMGT/HLA | YGVNLYQSYGPSGQYTHEFDGDEQFYVDLGRKE | 812) |
| Accession No. | TVWCLPVLRQFRFDPQFALTNIAVTKHNLNILIK | |
| HLA00612) | RSNSTAATNEVPEVTVFSKSPVTLGQPNTLICLVD | |
| * Predicted signal | NIFPPVVNITWLSNGHSVTEGVSETSFLSKSDHSF | |
| peptide underlined | FKISYLTFLPSADEIYDCKVEHWGLDEPLLKHWE | |
| | PEIPAPMSELTETVVCALGLSVGLVGIVVGTVFII | |
| | RGLRSVGASRHQGPL | |
| DQB1*03:01 | MSWKKALRIPGGLRAATVTLMLAMLSTPVAEGR | (SEQ ID NO: |
| (IMGT/HLA | DSPEDFVYQFKAMCYFTNGTERVRYVTRYIYNR | 813) |
| Accession No. | EEYARFDSDVEVYRAVTPLGPPDAEYWNSQKEV | |
| HLA00625) | LERTRAELDTVCRHNYQLELRTTLQRRVEPTVTI | |
| * Predicted signal | SPSRTEALNHHNLLVCSVTDFYPAQIKVRWFRND | |
| peptide underlined | QEETTGVVSTPLIRNGDWTFQILVMLEMTPQHG | |
| | DVYTCHVEHPSLQNPITVEWRAQSESAQSKMLS | |
| | GIGGFVLGLIFLGLGLIIHHRSQKGLLH | |
| DQB1*02:01 | MSWKKALRIPGGLRAATVTLMLSMLSTPVAEGR | (SEQ ID NO: |
| (IMGT/HLA | DSPEDFVYQFKGMCYFTNGTERVRLVSRSIYNRE | 814) |
| Accession No. | EIVRFDSDVGEFRAVTLLGLPAAEYWNSQKDILE | |
| HLA00622) | RKRAAVDRVCRHNYQLELRTTLQRRVEPTVTISP | |
| * Predicted signal | SRTEALNHHNLLVCSVTDFYPAQIKVRWFRNDQ | |
| peptide underlined | EETAGVVSTPLIRNGDWTFQILVMLEMTPQRGD | |
| | VYTCHVEHPSLQSPITVEWRAQSESAQSKMLSGI | |
| | GGFVLGLIFLGLGLIIHHRSQKGLLH | |
| DQB1*06:02 | MSWKKALRIPGDLRVATVTLMLAMLSSLLAEGR | (SEQ ID NO: |
| (IMGT/HLA | DSPEDFVFQFKGMCYFTNGTERVRLVTRYIYNRE | 815) |
| Accession No. | EYARFDSDVGVYRAVTPQGRPDAEYWNSQKEV | |
| HLA00646) | LEGTRAELDTVCRHNYEVAFRGILQRRVEPTVTI | |
| * Predicted signal | SPSRTEALNHHNLLVCSVTDFYPGQIKVRWFRND | |
| peptide underlined | QEETAGVVSTPLIRNGDWTFQILVMLEMTPQRG | |
| | DVYTCHVEHPSLQSPITVEWRAQSESAQSKMLSG | |
| | VGGFVLGLIFLGLGLIIRQRSQKGLLH | |
| DQB1*05:01 | MSWKKSLRIPGDLRVATVTLMLAILSSSLAEGRD | (SEQ ID NO: |
| (IMGT/HLA | SPEDFVYQFKGLCYFTNGTERVRGVTRHIYNREE | 816) |
| Accession No. | YVRFDSDVGVYRAVTPQGRPVAEYWNSQKEVL | |
| HLA00638) | EGARASVDRVCRHNYEVAYRGILQRRVEPTVTIS | |
| * Predicted signal | PSRTEALNHHNLLICSVTDFYPSQIKVRWFRNDQ | |
| peptide underlined | EETAGVVSTPLIRNGDWTFQILVMLEMTPQRGD | |
| | VYTCHVEHPSLQSPITVEWRAQSESAQSKMLSGV | |
| | GGFVLGLIFLGLGLIIRQRSRKGLLH | |
| DQB1*02:02 | MSWKKALRIPGGLRAATVTLMLSMLSTPVAEGR | (SEQ ID NO: |
| (IMGT/HLA | DSPEDFVYQFKGMCYFTNGTERVRLVSRSIYNRE | 817) |
| Accession No. | EIVRFDSDVGEFRAVTLLGLPAAEYWNSQKDILE | |
| HLA00623) | RKRAAVDRVCRHNYQLELRTTLQRRVEPTVTISP | |
| * Predicted signal | SRTEALNHHNLLVCSVTDFYPAQIKVRWFRNGQ | |
| peptide underlined | EETAGVVSTPLIRNGDWTFQILVMLEMTPQRGD | |
| | VYTCHVEHPSLQSPITVEWRAQSESAQSKMLSGI | |
| | GGFVLGLIFLGLGLIIHHRSQKGLLH | |
| DQB1*03:02 | MSWKKALRIPGGLRVATVTLMLAMLSTPVAEGR | (SEQ ID NO: |
| (IMGT/HLA | DSPEDFVYQFKGMCYFTNGTERVRLVTRYIYNR | 818) |
| Accession No. | EEYARFDSDVGVYRAVTPLGPPAAEYWNSQKEV | |
| HLA00627) | LERTRAELDTVCRHNYQLELRTTLQRRVEPTVTI | |
| * Predicted signal | SPSRTEALNHHNLLVCSVTDFYPAQIKVRWFRND | |
| peptide underlined | QEETTGVVSTPLIRNGDWTFQILVMLEMTPQRGD | |
| | VYTCHVEHPSLQNPIIVEWRAQSESAQSKMLSGI | |
| | GGFVLGLIFLGLGLIIHHRSQKGLLH | |
| DQB1*06:03 | MSWKKALRIPGDLRVATVTLMLAMLSSLLAEGR | (SEQ ID NO: |
| (IMGT/HLA | DSPEDFVYQFKGMCYFTNGTERVRLVTRHIYNR | 819) |
| Accession No. | EEYARFDSDVGVYRAVTPQGRPDAEYWNSQKE | |
| HLA00647) | VLEGTRAELDTVCRHNYEVAFRGILQRRVEPTVT | |
| * Predicted signal | ISPSRTEALNHHNLLVCSVTDFYPGQIKVRWFRN | |
| peptide underlined | DQEETAGVVSTPLIRNGDWTFQILVMLEMTPQR | |
| | GDVYTCHVEHPSLQSPITVEWRAQSESAQSKMLS | |
| | GVGGFVLGLIFLGLGLIIRQRSQKGLLH | |
| DQB1*03:03 | MSWKKALRIPGGLRVATVTLMLAMLSTPVAEGR | (SEQ ID NO: |
| (IMGT/HLA | DSPEDFVYQFKGMCYFTNGTERVRLVTRYIYNR | 820) |
| Accession No. | EEYARFDSDVGVYRAVTPLGPPDAEYWNSQKEV | |
| HLA00629) | LERTRAELDTVCRHNYQLELRTTLQRRVEPTVTI | |
| * Predicted signal | SPSRTEALNHHNLLVCSVTDFYPAQIKVRWFRND | |
| peptide underlined | QEETTGVVSTPLIRNGDWTFQILVMLEMTPQRGD | |
| | VYTCHVEHPSLQNPIIVEWRAQSESAQSKMLSGI | |
| | GGFVLGLIFLGLGLIIHHRSQKGLLH | |
| DQB1*06:04 | MSWKKALRIPGDLRVATVTLMLAMLSSLLAEGR | (SEQ ID NO: |
| (IMGT/HLA | DSPEDFVYQFKGMCYFTNGTERVRLVTRHIYNR | 821) |
| Accession No. | EEYARFDSDVGVYRAVTPQGRPVAEYWNSQKE | |
| HLA00648) | VLERTRAELDTVCRHNYEVGYRGILQRRVEPTV | |
| * Predicted signal | TISPSRTEALNHHNLLVCSVTDFYPGQIKVQWFR | |
| peptide underlined | NDQEETAGVVSTPLIRNGDWTFQILVMLEMTPQ | |
| | RGDVYTCHVEHPSLQSPITVEWRAQSESAQSKM | |
| | LSGVGGFVLGLIFLGLGLIIRQRSQKGLLH | |
| DQB1*05:03 | MSWKKSLRIPGDLRVATVTLMLAILSSSLAEGRD | (SEQ ID NO: |
| (IMGT/HLA | SPEDFVYQFKGLCYFTNGTERVRGVTRHIYNREE | 822) |
| Accession No. | YVRFDSDVGVYRAVTPQGRPDAEYWNSQKEVL | |
| HLA00640) | EGARASVDRVCRHNYEVAYRGILQRRVEPTVTIS | |
| * Predicted signal | PSRTEALNHHNLLICSVTDFYPSQIKVRWFRNDQ | |
| peptide underlined | EETAGVVSTPLIRNGDWTFQILVMLEMTPQRGD | |
| | VYTCHVEHPSLQSPITVEWRAQSESAQSKMLSGV | |
| | GGFVLGLIFLGLGLIIRQRSRKGPQGPPPAGLLH | |
| DQB1*04:02 | MSWKKALRIPGGLRVATVTLMLAMLSTPVAEGR | (SEQ ID NO: |
| (IMGT/HLA | DSPEDFVFQFKGMCYFTNGTERVRGVTRYIYNR | 823) |
| Accession No. | EEYARFDSDVGVYRAVTPLGRLDAEYWNSQKDI | |
| HLA00637) | LEEDRASVDTVCRHNYQLELRTTLQRRVEPTVTI | |
| * Predicted signal | SPSRTEALNHHNLLVCSVTDFYPAQIKVRWFRND | |
| peptide underlined | QEETTGVVSTPLIRNGDWTFQILVMLEMTPQRGD | |
| | VYTCHVEHPSLQNPIIVEWRAQSESAQSKMLSGI | |
| | GGFVLGLIFLGLGLIIHHRSQKGLLH | |
| DPA1*01:03 | MRPEDRMFHIRAVILRALSLAFLLSLRGAGAIKA | (SEQ ID NO: |
| (IMGT/HLA | DHVSTYAAFVQTHRPTGEFMFEFDEDEMFYVDL | 824) |
| Accession No. | DKKETVWHLEEFGQAFSFEAQGGLANIAILNNNL | |
| HLA00499) | NTLIQRSNHTQATNDPPEVTVFPKEPVELGQPNT | |
| * Predicted signal | LICHIDKFFPPVLNVTWLCNGELVTEGVAESLFLP | |
| peptide underlined | RTDYSFHKFHYLTFVPSAEDFYDCRVEHWGLDQ | |
| | PLLKHWEAQEPIQMPETTETVLCALGLVLGLVGI | |
| | IVGTVLIIKSLRSGHDPRAQGTL | |
| DPA1*02:01 | MRPEDRMFHIRAVILRALSLAFLLSLRGAGAIKA | (SEQ ID NO: |
| (IMGT/HLA | DHVSTYAAFVQTHRPTGEFMFEFDEDEQFYVDL | 825) |
| Accession No. | DKKETVWHLEEFGRAFSFEAQGGLANIAILNNNL | |
| HLA00504) | NTLIQRSNHTQAANDPPEVTVFPKEPVELGQPNT | |
| * Predicted signal | LICHIDRFFPPVLNVTWLCNGEPVTEGVAESLFLP | |
| peptide underlined | RTDYSFHKFHYLTFVPSAEDVYDCRVEHWGLDQ | |
| | PLLKHWEAQEPIQMPETTETVLCALGLVLGLVGI | |
| | IVGTVLIIKSLRSGHDPRAQGPL | |
| DPA1*02:07 | MRPEDRMFHIRAVILRALSLAFLLSLRGAGAIKA | (SEQ ID NO: |
| (IMGT/HLA | DHVSTYAMFVQTHRPTGEFMFEFDEDEQFYVDL | 826) |
| Accession No. | DKKETVWHLEEFGRAFSFEAQGGLANIAILNNNL | |
| HLA15619) | NTLIQRSNHTQAANDPPEVTMFPKEPVELGQPNT | |
| * Predicted signal | LICHIDRFFPPVLNVTWLCNGEPVTEGVAESLFLP | |
| peptide underlined | RTDYSFHKFHYLTFVPSAEDVYDCRVEHWGLDQ | |
| | PLLKHWEAQEPIQMPETTETVLCALGLVLGLVGI | |
| | IVGTVLIIKSLRSGHDPRAQGPL | |
| DPB1*04:01 | MMVLQVSAAPRTVALTALLMVLLTSVVQGRAT | (SEQ ID NO: |
| (IMGT/HLA | PENYLFQGRQECYAFNGTQRFLERYIYNREEFAR | 827) |
| Accession No. | FDSDVGEFRAVTELGRPAAEYWNSQKDILEEKR | |
| HLA00521) | AVPDRMCRHNYELGGPMTLQRRVQPRVNVSPS | |
| * Predicted signal | KKGPLQHHNLLVCHVTDFYPGSIQVRWFLNGQE | |
| peptide underlined | ETAGVVSTNLIRNGDWTFQILVMLEMTPQQGDV | |
| | YTCQVEHTSLDSPVTVEWKAQSDSARSKTLTGA | |
| | GGFVLGLIICGVGIFMHRRSKKVQRGSA | |
| DPB1*02:01 | MMVLQVSAAPRTVALTALLMVLLTSVVQGRAT | (SEQ ID NO: |
| (IMGT/HLA | PENYLFQGRQECYAFNGTQRFLERYIYNREEFVR | 828) |
| Accession No. | FDSDVGEFRAVTELGRPDEEYWNSQKDILEEERA | |
| HLA00517) | VPDRMCRHNYELGGPMTLQRRVQPRVNVSPSK | |
| * Predicted signal | KGPLQHHNLLVCHVTDFYPGSIQVRWFLNGQEE | |
| peptide underlined | TAGVVSTNLIRNGDWTFQILVMLEMTPQQGDVY | |
| | TCQVEHTSLDSPVTVEWKAQSDSARSKTLTGAG | |
| | GFVLGLIICGVGIFMHRRSKKVQRGSA | |
| DPB1*04:02 | MMVLQVSAAPRTVALTALLMVLLTSVVQGRAT | (SEQ ID NO: |
| (IMGT/HLA | PENYLFQGRQECYAFNGTQRFLERYIYNREEFVR | 829) |
| Accession No. | FDSDVGEFRAVTELGRPDEEYWNSQKDILEEKR | |
| HLA00522) | AVPDRMCRHNYELGGPMTLQRRVQPRVNVSPS | |
| * Predicted signal | KKGPLQHHNLLVCHVTDFYPGSIQVRWFLNGQE | |
| peptide underlined | ETAGVVSTNLIRNGDWTFQILVMLEMTPQQGDV | |
| | YTCQVEHTSMDSPVTVEWKAQSDSARSKTLTGA | |
| | GGFVLGLIICGVGIFMHRRSKKVQRGSA | |
| DPB1*03:01 | MMVLQVSAAPRTVALTALLMVLLTSVVQGRAT | (SEQ ID NO: |
| (IMGT/HLA | PENYVYQLRQECYAFNGTQRFLERYIYNREEFVR | 830) |
| Accession No. | FDSDVGEFRAVTELGRPDEDYWNSQKDLLEEKR | |
| HLA00520) | AVPDRVCRHNYELDEAVTLQRRVQPKVNVSPSK | |
| * Predicted signal | KGPLQHHNLLVCHVTDFYPGSIQVRWFLNGQEE | |
| peptide underlined | TAGVVSTNLIRNGDWTFQILVMLEMTPQQGDVY | |
| | ICQVEHTSLDSPVTVEWKAQSDSARSKTLTGAG | |
| | GFVLGLIICGVGIFMHRRSKKVQRGSA | |
| DPB1*01:01 | MMVLQVSAAPRTVALTALLMVLLTSVVQGRAT | (SEQ ID NO: |
| (IMGT/HLA | PENYVYQGRQECYAFNGTQRFLERYIYNREEYA | 831) |
| Accession No. | RFDSDVGEFRAVTELGRPAAEYWNSQKDILEEK | |
| HLA00514) | RAVPDRVCRHNYELDEAVTLQRRVQPKVNVSPS | |
| * Predicted signal | KKGPLQHHNLLVCHVTDFYPGSIQVRWFLNGQE | |
| peptide underlined | ETAGVVSTNLIRNGDWTFQILVMLEMTPQQGDV | |
| | YICQVEHTSLDSPVTVEWKAQSDSAQSKTLTGA | |
| | GGFVLGLIICGVGIFMHRRSKKVQRGSA | |
| DPB1*11:01 | MMVLQVSAAPRTVALTALLMVLLTSVVQGRAT | (SEQ ID NO: |
| (IMGT/HLA | PENYVYQLRQECYAFNGTQRFLERYIYNRQEYA | 832) |
| Accession No. | RFDSDVGEFRAVTELGRPAAEYWNSQKDLLEER | |
| HLA00528) | RAVPDRMCRHNYELDEAVTLQRRVQPKVNVSPS | |
| * Predicted signal | KKGPLQHHNLLVCHVTDFYPGSIQVRWFLNGQE | |
| peptide underlined | ETAGVVSTNLIRNGDWTFQILVMLEMTPQQGDV | |
| | YICQVEHTSLDSPVTVEWKAQSDSARSKTLTGA | |
| | GGFVLGLIICGVGIFMHRRSKKVQRGSA | |
| DPB1*05:01 | MMVLQVSAAPRTVALTALLMVLLTSVVQGRAT | (SEQ ID NO: |
| (IMGT/HLA | PENYLFQGRQECYAFNGTQRFLERYIYNREELVR | 833) |
| Accession No. | FDSDVGEFRAVTELGRPEAEYWNSQKDILEEKR | |
| HLA00523) | AVPDRMCRHNYELDEAVTLQRRVQPKVNVSPSK | |
| * Predicted signal | KGPLQHHNLLVCHVTDFYPGSIQVRWFLNGQEE | |
| peptide underlined | TAGVVSTNLIRNGDWTFQILVMLEMTPQQGDVY | |
| | ICQVEHTSLDSPVTVEWKAQSDSARSKTLTGAG | |
| | GFMLGLIICGVGIFMHRRSKKVQRGSA | |
| DPB1*10:01 | MMVLQVSAAPRTVALTALLMVLLTSVVQGRAT | (SEQ ID NO: |
| (IMGT/HLA | PENYVHQLRQECYAFNGTQRFLERYIYNREEFVR | 834) |
| Accession No. | FDSDVGEFRAVTELGRPDEEYWNSQKDILEEERA | |
| HLA00527) | VPDRVCRHNYELDEAVTLQRRVQPKVNVSPSKK | |
| * Predicted signal | GPLQHHNLLVCHVTDFYPGSIQVRWFLNGQEET | |
| peptide underlined | AGVVSTNLIRNGDWTFQILVMLEMTPQQGDVYI | |
| | CQVEHTSLDSPVTVEWKAQSDSARSKTLTGAGG | |
| | FVLGLIICGVGIFMHRRSKKVQRGSA | |
| DPB1*06:01 | MMVLQVSAAPRTVALTALLMVLLTSVVQGRAT | (SEQ ID NO: |
| (IMGT/HLA | PENYVYQLRQECYAFNGTQRFLERYIYNREEFVR | 835) |
| Accession No. | FDSDVGEFRAVTELGRPDEDYWNSQKDLLEEER | |
| HLA00524) | AVPDRMCRHNYELDEAVTLQRRVQPKVNVSPSK | |
| * Predicted signal | KGPLQHHNLLVCHVTDFYPGSIQVRWFLNGQEE | |
| peptide underlined | TAGVVSTNLIRNGDWTFQILVMLEMTPQQGDVY | |
| | ICQVEHTSLDSPVTVEWKAQSDSARSKTLTGAG | |
| | GFVLGLIICGVGIFMHRRSKKVQRGSA | |
| DPB1*13:01 | MMVLQVSAAPRTVALTALLMVLLTSVVQGRAT | (SEQ ID NO: |
| (IMGT/HLA | PENYVYQLRQECYAFNGTQRFLERYIYNREEYA | 836) |
| Accession No. | RFDSDVGEFRAVTELGRPAAEYWNSQKDILEEER | |
| HLA00530) | AVPDRICRHNYELDEAVTLQRRVQPKVNVSPSK | |
| * Predicted signal | KGPLQHHNLLVCHVTDFYPGSIQVRWFLNGQEE | |
| peptide underlined | TAGVVSTNLIRNGDWTFQILVMLEMTPQQGDVY | |
| | ICQVEHTSLDSPVTVEWKAQSDSARSKTLTGAG | |
| | GFVLGLIICGVGIFMHRRSKKVQRGSA | |
| DPB1*14:01 | MMVLQVSAAPRTVALTALLMVLLTSVVQGRAT | (SEQ ID NO: |
| (IMGT/HLA | PENYVHQLRQECYAFNGTQRFLERYIYNREEFVR | 837) |
| Accession No. | FDSDVGEFRAVTELGRPDEDYWNSQKDLLEEKR | |
| HLA00531) | AVPDRVCRHNYELDEAVTLQRRVQPKVNVSPSK | |
| * Predicted signal | KGPLQHHNLLVCHVTDFYPGSIQVRWFLNGQEE | |
| peptide underlined | TAGVVSTNLIRNGDWTFQILVMLEMTPQQGDVY | |
| | ICQVEHTSLDSPVTVEWKAQSDSARSKTLTGAG | |
| | GFVLGLIICGVGIFMHRRSKKVQRGSA | |
| DPB1*17:01 | MMVLQVSAAPRTVALTALLMVLLTSVVQGRAT | (SEQ ID NO: |
| (IMGT/HLA | PENYVHQLRQECYAFNGTQRFLERYIYNREEFVR | 838) |
| Accession No. | FDSDVGEFRAVTELGRPDEDYWNSQKDILEEER | |
| HLA00534) | AVPDRMCRHNYELDEAVTLQRRVQPRVNVSPSK | |
| * Predicted signal | KGPLQHHNLLVCHVTDFYPGSIQVRWFLNGQEE | |
| peptide underlined | TAGVVSTNLIRNGDWTFQILVMLEMTPQQGDVY | |
| | TCQVEHTSLDSPVTVEWKAQSDSARSKTLTGAG | |
| | GFVLGLIICGVGIFMHRRSKKVQRGSA | |

[0391] Additional MHC allele amino acid sequences are known in the art and are available, for example at the IMGT/HLA Database (available on the world wide web at ebi.ac.uk/ipd/imgt/hla/; see Robinson et al. Nucl. Acids Res. 43: D423-431 (2015)).

[0392] In certain embodiments, the polypeptide is an exogenous antigen-presenting polypeptide as described herein. An exemplary exogenous antigen-presenting polypeptide includes:

[0393] a) a naturally occurring form of the human polypeptide;

[0394] b) the human polypeptide having a sequence appearing in a database, e.g., GenBank database, on Dec. 22, 2017;

[0395] c) a human polypeptide having a sequence that differs by no more than 1, 2, 3, 4, 5 or 10 amino acid residues from a sequence of a) or b);

[0396] d) a human polypeptide having a sequence that differs at no more than 1, 2, 3, 4, 5 or 10% its amino acids residues from a sequence of a) or b);

[0397] e) a human polypeptide having a sequence that does not differ substantially from a sequence of a) or b); or

[0398] f) a human polypeptide having a sequence of c), d), or e) that does not differ substantially in a biological activity, e.g., an enzymatic activity (e.g., specificity or turnover) or binding activity (e.g., binding specificity or affinity for an antigenic peptide) from a human polypeptide having the sequence of a) or b). Candidate peptides under f) can be made and screened for similar activity as described herein and would be equivalent hereunder if expressed in engineered erythroid cells as described herein).

[0399] In embodiments, an exogenous antigen-presenting polypeptide comprises a human polypeptide or fragment thereof, e.g., all or a fragment of a human polypeptide of a), b), c), d), e), or f) of the preceding paragraph. In an embodiment, the exogenous antigen-presenting polypeptide comprises a fusion polypeptide comprising all or a fragment of a human polypeptide of a), b), c), d), e), or f) of the preceding paragraph and additional amino acid sequence. In an embodiment the additional amino acid sequence comprises all or a fragment of human polypeptide of a), b), c), d), e), or f) of the preceding paragraph for a different human exogenous antigen-presenting polypeptide.

[0400] In some embodiments of the present disclosure, the artificial antigen presenting cell comprises an erythroid cell or enucleated cell that does not comprise an endogenous antigen presenting polypeptide (e.g. a MHC class I or MHC class II molecule). In some embodiments, the artificial antigen presenting cell comprises an erythroid cell or enucleated cell that has been derived from an erythroid precursor cell that has not been genetically modified to delete and/or alter expression of an endogenous antigen presenting polypeptide (e.g. a MHC class I or MHC class II molecule).

### Exogenous Costimulatory Polypeptides

[0401] An exogenous costimulatory polypeptide includes a polypeptide on an antigen presenting cell (e.g., an aAPC) that specifically binds a cognate costimulatory molecule on a T cell (e.g., an MHC molecule, B and T lymphocyte attenuator (CD272) and a Toll ligand receptor), thereby providing a signal which mediates a T cell response, including, but not limited to, proliferation, activation, differentiation, and the like. A costimulatory polypeptide also encompasses, inter alia, an antibody that specifically binds with a costimulatory molecule present on a T cell. Such antibody preferably binds and acts as an agonist to the costimulatory molecule on the T cell.

[0402] In some embodiments, the desired response is cell death, e.g., of an infected cell. In some embodiments, the costimulatory polypeptides trigger multiple T cell activation pathways to induce an immune response. In some embodiments, the aAPC comprising, inter alia, costimulatory polypeptides, promotes T cell proliferation. In embodiments, one or more (e.g., 2, 3, 4, or 5 or more) costimulatory polypeptides comprise an activating polypeptide of Table 6, below, or a T-cell activating variant (e.g., fragment) thereof. In embodiments, one or more (e.g., 2, 3, 4, or 5 or more) costimulatory polypeptides comprise an antibody molecule (e.g. agonizing antibody) that binds a target receptor of Table 6 or a T-cell activating variant (e.g., fragment) thereof. In some embodiments, the costimulatory polypeptides comprise different T cell activation ligands, e.g. one or more activating polypeptides of Table 6, in any combination thereof, to stimulate T cells. In some embodiments, the aAPC comprises an erythroid cell (e.g. an enucleated cell) that presents, e.g. comprises on the cell surface, 4-1BBL, OX40L, and CD40L, or fragments or variants thereof. In embodiments, these proteins signal through complementary activation pathways. The costimulatory polypeptides can be derived from endogenous T cell activation ligands or from antibody molecules to the target receptors.

TABLE 6
Costimulatory Polypeptides

| Activating Polypeptide (Ligand) | Target Receptor on T cell |
|---|---|
| B7-H2 (e.g., Accession Number | ICOS, CD28 (e.g., Accession Number |
| NP_056074.1) | NP_006130.1) |
| B7-1 (e.g., Accession Number NP_005182.1) | CD28 (e.g., Accession Number |
| | NP_006130.1) |
| B7-2 (e.g., Accession Number AAA86473) | CD28 (e.g., Accession Number |
| | NP_006130.1) |
| CD70 (e.g., Accession Number | CD27 (e.g., Accession Number |
| NP_001243.1) | NP_001233.1) |
| LIGHT (e.g., Accession Number | HVEM (e.g., Accession Number |
| NP_003798.2) | AAQ89238.1) |
| HVEM (e.g., Accession Number | LIGHT (e.g., Accession Number |
| AAQ89238.1) | NP_003798.2) |
| CD40L (e.g., Accession Number | CD40 (e.g., Accession Number |
| BAA06599.1) | NP_001241.1) |
| 4-1BBL (e.g., Accession Number | 4-1BB (e.g., Accession NP_001552.2) |
| NP_003802.1) | |
| OX40L (e.g., Accession Number | OX40 (e.g., Accession Number |
| NP_003317.1) | NP_003318.1) |
| TL1A (e.g., Accession Number | DR3 (e.g., Accession Number NP_683866.1) |
| NP_005109.2) | |
| GITRL (e.g., Accession Number | GITR (e.g., Accession Number |
| NP_005083.2) | NP_004186.1) |
| CD30L (e.g., Accession Number | CD30 (e.g., Accession Number |
| NP_001235.1), | NP_001234.3) |
| TIM4 (e.g., Accession Number | TIM1 (e.g., Accession Number |
| NP_612388.2) | NP_036338.2) |
| SLAM (e.g., Accession Number | SLAM (e.g., Accession Number |
| AAK77968.1) | AAK77968.1) |
| CD48 (e.g., Accession Number | CD2 (e.g., Accession Number |
| CAG33293.1) | NP_001315538.1) |
| CD58 (e.g., Accession Number | CD2 (e.g., Accession Number |
| CAG33220.1) | NP_001315538.1) |
| CD155 (e.g., Accession Number | CD226 (e.g., Accession Number |
| NP_001129240.1) | NP_006557.2) |
| CD112 (e.g., Accession Number | CD226 (e.g., Accession Number |
| NP_001036189.1) | NP_006557.2) |
| CD137L (e.g., Accession Number | CD137 (e.g., Accession NP_001552.2) |
| NP_003802.1) | |

[0403] In some embodiments, the polypeptide comprising 4-1BBL is an N-terminal truncated 4-1BBL (e.g. SEQ ID NO: 851). In some embodiments, the polypeptide comprising 4-1BBL is full length 4-1BBL.

[0404] In some embodiments, the one or more costimulatory polypeptides comprises an activating cytokine, interferon or TNF family member, e.g., IFNα, IL2, IL6 or any combination thereof. Activating cytokines, interferons and TNF family members which are useful in the invention are discussed further below. In embodiments, the one or more costimulatory polypeptides comprises one or more activating cytokine, interferon or TNF family member, and further comprises one or more activating polypeptide or ligand (e.g., of Table 6) or a T-cell activating variant (e.g., fragment) thereof, or one or more antibody molecules (e.g. agonizing antibody) that binds a target costimulatory T cell receptor (e.g., of Table 6) or a T-cell activating variant (e.g., fragment) thereof.

[0405] T-Cell Expansion

[0406] In certain embodiments, the disclosure features aAPCs that can be used to specifically induce proliferation of a T cell expressing a known co-stimulatory molecule. The method comprises contacting a T cell that is to be expanded with an aAPC presenting (e.g. comprising on the cell surface) an exogenous polypeptide that specifically binds with the co-stimulatory molecule expressed by the T-cell. Thus, contacting a T cell with an aAPC comprising, among other things, a costimulatory ligand that specifically binds a cognate costimulatory molecule expressed on the T cell surface, stimulates the T cell and induces T cell proliferation such that large numbers of specific T cells can be readily produced. The aAPC expands the T cell “specifically” in that only the T cells expressing the particular costimulatory molecule are expanded by the aAPC. Thus, where the T cell to be expanded is present in a mixture of cells, some or most of which do not express the costimulatory molecule, only the T cell of interest will be induced to proliferate and expand in cell number. The T cell can be further purified using a wide variety of cell separation and purification techniques, such as those known in the art and/or described elsewhere herein.

[0407] As would be appreciated by the skilled artisan, based upon the disclosure provided herein, the T cell of interest need not be identified or isolated prior to expansion using the aAPC. This is because the aAPC is selective and will only expand the T cell(s) expressing the cognate costimulatory molecule.

[0408] In certain embodiments, the polypeptide is an exogenous costimulatory polypeptide as described herein. An exemplary costimulatory polypeptide includes:

[0409] a) a naturally occurring form of the human polypeptide;

[0410] b) the human polypeptide having a sequence appearing in a database, e.g., GenBank database, on Dec. 22, 2017;

[0411] c) a human polypeptide having a sequence that differs by no more than 1, 2, 3, 4, 5 or 10 amino acid residues from a sequence of a) or b);

[0412] d) a human polypeptide having a sequence that differs at no more than 1, 2, 3, 4, 5 or 10% its amino acids residues from a sequence of a) or b);

[0413] e) a human polypeptide having a sequence that does not differ substantially from a sequence of a) or b); or

[0414] f) a human polypeptide having a sequence of c), d), or e) that does not differ substantially in a biological activity, e.g., an enzymatic activity (e.g., specificity or turnover) or binding activity (e.g., binding specificity or affinity) from a human polypeptide having the sequence of a) or b). Candidate peptides under f) can be made and screened for similar activity as described herein and would be equivalent hereunder if expressed in engineered erythroid cells as described herein).

[0415] In embodiments, an exogenous costimulatory polypeptide comprises a human polypeptide or fragment thereof, e.g., all or a fragment of a human polypeptide of a), b), c), d), e), or f) of the preceding paragraph. In an embodiment, the exogenous costimulatory polypeptide comprises a fusion polypeptide comprising all or a fragment of a human polypeptide of a), b), c), d), e), or f) of the preceding paragraph and additional amino acid sequence. In an embodiment the additional amino acid sequence comprises all or a fragment of human polypeptide of a), b), c), d), e), or f) of the preceding paragraph for a different human costimulatory polypeptide.

[0416] In embodiments, an aAPC cell targets multiple T cell activating pathways in combination (e.g., as described in Table 6, above), e.g., using ligands or antibody molecules, or both, co-expressed (or co-presented) on an aAPC.

[0417] In some embodiments, the at least one exogenous costimulatory polypeptide is selected from the group consisting of 4-1BBL, LIGHT, CD80, CD86, CD70, IL-7, IL-12, OX40L, GITRL, TIM4, SLAM, CD48, CD58, CD83, CD155, CD112, IL-15Rα fused to IL-15, IL-2, IL-21, a ligand for ICAM-1, a ligand for LFA-1, and combinations thereof. In some embodiments, the at least one exogenous costimulatory polypeptide is an agonist antibody to the cognate costimulatory ligand receptor. For example, in certain embodiments, the costimulatory polypeptide is an agonist antibody to 4-1-BB, LIGHT receptor (HVEM), CD80 receptor, CD86 receptor, OX40, GITR, TIM4 receptor (TIM1), SLAM receptor, CD48 receptor (CD2), CD58 receptor (CD2), CD 83 receptor, CD155 receptor (CD226), CD112 receptor (CD226), IL-2 receptor (CD25, CD122, CD132), IL-21 receptor, ICAM, and combinations thereof. In certain embodiments, the at least one exogenous costimulatory polypeptides is an anti CD3 antibody or an anti-CD38 antibody and combinations thereof. In another embodiment, the aAPC presents, e.g. comprises on the cell surface, at least two, at least 3, at least 4, or at least 5 exogenous costimulatory polypeptides. In some embodiments, the costimulatory proteins are fused to each other, for example IL-21 fused to IL-2.

[0418] In some embodiments, the one or more costimulatory polypeptides include or are fused to a membrane anchor. In some embodiments, the membrane anchor is selected from a sequence set forth in Table 3. In some embodiments, the one or more costimulatory polypeptides include or are fused to a leader sequence. In some embodiments, the leader sequence is selected from a sequence set forth in Table 2.

### Exogenous Co-Inhibitory Polypeptides

[0419] An exogenous co-inhibitory polypeptide is any polypeptide that suppresses a T cell, including inhibition of T cell activity, inhibition of T cell proliferation, anergizing of a T cell, or induction of apoptosis of a T cell.

[0420] In some embodiments, an exogenous co-inhibitory polypeptide is an inhibitory polypeptide ligand on an antigen presenting cell that specifically binds a cognate coinhibitory molecule on a T cell. In some embodiments, the co-inhibitory polypeptide ligand is an inhibitory polypeptide shown in Table 7.

[0421] In some embodiments, an exogenous co-inhibitory polypeptide is an agonist (e.g. an antibody) that specifically binds a coinhibitory receptor on a T cell. In some embodiments, the agonist is an antibody that binds a receptor selected from the group consisting of: PD1, CTLA4, TIM3, CEACAM (e.g., CEACAM-1, CEACAM-3 and/or CEACAM-5), LAGS, VISTA, BTLA, TIGIT, LAIR1, CD160, and 2B4. In other embodiments, the agonist is an antibody that binds a target receptor on a T cell shown in Table 7.

TABLE 7
Co-inhibitory Polypeptides

| Inhibitory Polypeptide | Target Receptor on T cell |
|---|---|
| B7-1 | CTLA4, B7H1 |
| B7-2 | CTLA4 |
| B7DC | PD1 |
| B7H1 | PD1, B7-1 |
| HVEM | CD160, BTLA |
| COLLAGEN | LAIR1 |
| GALECTIN9 | TIM3 |
| CD48, TIM4 | TIM4R |
| CD48 | 2B4 |
| CD155, CD112, CD113 | TIGIT |
| PDL1 | PD1 |
| | LAG3 |

[0422] In some embodiments, an exogenous co-inhibitory polypeptide is an antibody that blocks binding of a costimulatory polypeptide to its cognate costimulatory receptor. In various embodiments, the exogenous co-inhibitory polypeptide is an antibody that blocks binding of 4-1BBL, LIGHT, CD80, CD86, CD70, OX40L, GITRL, TIM4, SLAM, CD48, CD58, CD83, CD155, CD112, IL-15Rα fused to IL-15, IL-2, IL-21, ICAM, a ligand for LFA-1, an anti CD3 antibody or an anti CD28 antibody, to its receptor.

[0423] In other embodiments, the co-inhibitory polypeptide is selected from IL-35, IL-10, or VSIG-3.

[0424] In some embodiments, the exogenous co-inhibitory polypeptide is VSIG-3.

[0425] In other embodiments, an aAPC cell targets multiple T cell inhibitory pathways in combination (e.g., as described in Table 7, above), e.g., using ligands or antibody molecules, or both, co-expressed on an aAPC.

[0426] In certain embodiments, the polypeptide is an exogenous coinhibitory polypeptide as described herein. An exemplary coinhibitory polypeptide includes:

[0427] a) a naturally occurring form of the human polypeptide;

[0428] b) the human polypeptide having a sequence appearing in a database, e.g., GenBank database, on Dec. 22, 2017;

[0429] c) a human polypeptide having a sequence that differs by no more than 1, 2, 3, 4, 5 or 10 amino acid residues from a sequence of a) or b);

[0430] d) a human polypeptide having a sequence that differs at no more than 1, 2, 3, 4, 5 or 10% its amino acids residues from a sequence of a) or b);

[0431] e) a human polypeptide having a sequence that does not differ substantially from a sequence of a) or b); or

[0432] f) a human polypeptide having a sequence of c), d), or e) that does not differ substantially in a biological activity, e.g., an enzymatic activity (e.g., specificity or turnover) or binding activity (e.g., binding specificity or affinity) from a human polypeptide having the sequence of a) or b). Candidate peptides under f) can be made and screened for similar activity as described herein and would be equivalent hereunder if expressed in engineered erythroid cells as described herein).

[0433] In embodiments, an exogenous coinhibitory polypeptide comprises a human polypeptide or fragment thereof, e.g., all or a fragment of a human polypeptide of a), b), c), d), e), or f) of the preceding paragraph. In an embodiment, the exogenous coinhibitory polypeptide comprises a fusion polypeptide comprising all or a fragment of a human polypeptide of a), b), c), d), e), or f) of the preceding paragraph and additional amino acid sequence. In an embodiment the additional amino acid sequence comprises all or a fragment of human polypeptide of a), b), c), d), e), or f) of the preceding paragraph for a different human coinhibitory polypeptide.

[0434] In some embodiments, the aAPC presents, e.g. comprises on the cell surface, at least two, at least 3, at least 4, or at least 5 exogenous co-inhibitory polypeptides.

[0435] In some embodiments, the one or more co-inhibitory polypeptides include or are fused to a membrane anchor. In some embodiments, the membrane anchor is selected from a sequence set forth in Table 3. In some embodiments, the one or more co-inhibitory polypeptides include or are fused to a leader sequence. In some embodiments, the leader sequence is selected from a sequence set forth in Table 2.

### T-Cell Activation Signals

[0436] For efficient induction of T-cell proliferation, activation and expansion, several signals need to be transmitted from the aAPC to naïve T cells. These signals are commonly referred to as Signal 1, Signal 2 and Signal 3, and are described below. In some embodiments, the aAPCs described herein comprise one or more exogenous polypeptides comprising Signal 1, one or more exogenous polypeptides comprising Signal 2, and/or one or more exogenous polypeptides comprising Signal 3, in any combination as set forth below. In some embodiments, in addition to Signal 1, Signal 2 and Signal 3, the aAPCs described herein further comprise one or more exogenous polypeptides comprising one or more cell adhesion molecules to further facilitate the interation between T-cells and the aAPCs. It is to be understood that when an aAPC comprises the one or more exogenous polypeptides comprising Signal 1 and/or the one or more exogenous polypeptides comprising Signal 2 and/or the one or more exogenous polypeptides comprising Signal 3 (and optionally the one or more polypeptides comprising a cell adhesion molecules), the exogenous polypeptides comprising Signal 1 and/or Signal 2 and/or Signal 3 and/or a cell adhesion molecule are all comprised on the same aAPC.

[0437] The aAPCs described herein offer numerous advantages over the use of spherical nanoparticles, such as rigid, bead-based aAPCs. For example, the membrane of an aAPC as described herein (i.e., an engineered erythroid cell or enucleated cell) is much more dynamic and fluid than the outer surface of a nanoparticle, which is rigid and immobile, and therefore limits the movement of the polypeptides on its surface. The fluidity of the aAPC membrane allows for greater molecular mobility and more efficient molecular reorganization, and is advantageous for immunological synapse formation and T cell stimulation. In some embodiments, the aAPCs described herein comprising one or more exogenous polypeptides comprising Signal 1, one or more exogenous polypeptides comprising Signal 2, and/or one or more exogenous polypeptides comprising Signal 3, in any combination as set forth below, on the surface of the cells, provide a more controlled stimulation of T-cells, thereby allowing for the propagation of T-cells with a specific phenotype and activity. In some embodiments, by engineering the aAPCs to comprise Signal 1 and/or Signal 2 and/or Signal 3 on the surface of the cell, the aAPCs provide optimal control over the signals provided to T-cells.

[0438] Signal 1—Antigen Recognition

[0439] T cell activation occurs after a T cell receptor (TCR) recognizes a specific peptide antigen presented on MHC complexes of an aAPC as described herein. Generally, exogenous antigenic polypeptides presented on MHC class II are recognized by the TCR in conjunction with the CD4 T cell co-receptor. Exogenous antigenic polypeptides presented on MHC class I are recognized by the TCR in conjunction with a CD8 T cell co-receptor. Ligation of the TCR by a peptide-MHC complex leads to transduction of the signals necessary for activation of the T cell.

[0440] In some embodiments, Signal 1 comprises one more more exogenous polypeptides comprising an antigen-presenting polypeptide. In some embodiments, Signal 1 comprises an antigen presenting polypeptide specifically bound to (presenting) an antigenic peptide (e.g, covalently or non-covalently). In some embodiments, the antigen-presenting polypeptide is an MHC class I polypeptide, an MHC class I single chain fusion, an MHC class II polypeptide, or an MHC class II single chain fusion. In some embodiments, the MHC class I polypeptide is selected from the group consisting of HLA A, HLA B, and HLA C. In some embodiments, the MHC class II polypeptide is selected from the group consisting of HLA-DPα, HLA-DPβ, HLA-DM, HLA DOA, HLA DOB, HLA DQα, HLA DQβ, HLA DRα, and HLA DRβ.

[0441] Signal 2—Co-Stimulation

[0442] To become fully activated, T cells require a second signal in addition to TCR-mediated antigen recognition. This second signal, or co-stimulation, is important for proper T cell activation. In some embodiments, signal 2 comprises one or more exogenous costimulatory polypeptides. In some embodiments, the one or more exogenous costimulatory polypeptides is selected from the group consisting of 4-1BBL, LIGHT, anti CD28, CD80, CD86, CD70, OX40L, GITRL, TIM4, SLAM, CD48, CD58, CD83, CD155, CD112, IL-15, IL-15Rα fused to IL-15, IL-21, ICAM-1, a ligand for LFA-1, anti CD3 antibody, and any combination thereof. In some embodiments, Signal 2 comprises one or more exogenous costimulatory polypeptides selected from the group consisting of 4-1BBL, CD80, CD86, CD83, CD70, LIGHT, HVEM, CD40L, OX40L, TL1A, GITRL, and CD30L.

[0443] Signal 3—Cytokines

[0444] To induce more efficient expansion and specific differentiation of T cells, a third signal (Signal 3) can be used. In some embodiments, Signal 3 comprises one or more exogenous polypeptides comprising one or more cytokines. In some embodiments, Signal 3 comprises one or more exogenous polypeptides selected from the group consisting of IL2, IL15, IL7, IL12, IL18, IL21, IL4; IL6, IL23, IL27, IL17, IL10, TGF-beta, IFN-gamma, IL-1 beta, GM-CSF, IL-15, IL-15Rα fused to IL-15, and IL-25

[0445] In addition to immunostimulatory cytokines, immunoinhibitory cytokines are capable of dampening the immune response or can lead to tolerance. Accordingly, in some embodiments, Signal 3 comprises one or more exogenous co-inhibitory polypeptides. In some embodiments, the one or more exogenous co-inhibitory polypeptide is selected from the group consisting of IL-35, IL-10, VSIG-3 and a LAG3 agonist.

[0446] In some embodiments, the aAPC comprises at the cell surface an exogenous polypeptide comprising Signal 1.

[0447] In some embodiments, the aAPC comprises at the cell surface an exogenous polypeptide comprising Signal 1 and an exogenous polypeptide comprising Signal 2. In some embodiments, the aAPC comprises at the cell surface an exogenous polypeptide comprising Signal 1, an exogenous polypeptide comprising Signal 2, and an exogenous polypeptide comprising Signal 3. In some embodiments, the aAPC comprises at the cell surface more than one exogenous polypeptide comprising more than one Signal 1, and an exogenous polypeptide comprising Signal 2. In some embodiments, the aAPC comprises at the cell surface more than one exogenous polypeptide comprising more than one Signal 1, an exogenous polypeptide comprising Signal 2, and an exogenous polypeptide comprising Signal 3. In some embodiments, the aAPC comprises at the cell surface an exogenous polypeptide comprising Signal 1 and more than one exogenous polypeptide comprising more than one Signal 2. In some embodiments, the aAPC comprises at the cell surface an exogenous polypeptide comprising Signal 1, more than one exogenous polypeptide comprising more than one Signal 2, and an exogenous polypeptide comprising Signal 3. In some embodiments, the aAPC comprises at the cell surface an exogenous polypeptide comprising Signal 1, an exogenous polypeptide comprising Signal 2, and more than one exogenous polypeptide comprising more than one Signal 3. In some embodiments, the aAPC comprises at the cell surface more than one exogenous polypeptide comprising more than one Signal 1, an exogenous polypeptide comprising Signal 2, and more than one exogenous polypeptide comprising more than one Signal 3. In some embodiments, the aAPC comprises at the cell surface more than one exogenous polypeptide comprising more than one Signal 1, more than one exogenous polypeptide comprising more than one Signal 2, and an exogenous polypeptide comprising Signal 3. In some embodiments, the aAPC comprises at the cell surface more than one exogenous polypeptide comprising more than one Signal 1, more than one exogenous polypeptide comprising more than one Signal 2, and more than one exogenous polypeptide comprising more than one Signal 3.

[0448] In some embodiments, the aAPC comprises an exogenous polypeptide comprising Signal 1 and an exogenous polypeptide comprising Signal 2, wherein Signal 1 and Signal 2 are selected from the following combinations: MHC class I and 4-1BBL; MHC class II and 4-1BBL; MHC class I and CD80; MHC class II and CD80; MHC class I and CD86; MHC class II and CD86; MHC class I and CD83; MHC class II and CD83; MHC class I and CD70; MHC class II and CD70; MHC class I and LIGHT; MHC class II and LIGHT; MHC class I and HVEM; MHC class II and HVEM; MHC class I and CD40L; MHC class II and CD40L; MHC class I and OX40L; MHC class II and OX40L; MHC class I and TL1A; MHC class II and TL1A; MHC class I and GITRL; MHC class II and GITRL; MHC class I and CD30L; or MHC class II and CD30L.

[0449] In some embodiments, the aAPC comprises an exogenous polypeptide comprising Signal 1, an exogenous polypeptide comprising Signal 2, and an exogenous polypeptide comprising Signal 3, wherein Signal 1, Signal 2 and Signal 3 are selected from the following combinations: MHC class I, 4-1BBL, and IL2; MHC class II, 4-1BBL, and IL2; MHC class I, CD80, and IL2; MHC class II, CD80, and IL2; MHC class I, CD86, and IL2; MHC class II, CD86, and IL2; MHC class I, CD83, and IL2; MHC class II, CD83, and IL2; MHC class I, CD70, and IL2; MHC class II, CD70, and IL2; MHC class I, LIGHT, and IL2; MHC class II, LIGHT, and IL2; MHC class I, HVEM, and IL2; MHC class II, HVEM, and IL2; MHC class I, CD40L, and IL2; MHC class II, CD40L, and IL2; MHC class I, OX40L, and IL2; MHC class II, OX40L, and IL2; MHC class I, TL1A, and IL2; MHC class II, TL1A, and IL2; MHC class I, GITRL, and IL2; MHC class II, GITRL, and IL2; MHC class I, CD30L and IL2; MHC class II, CD30L and IL2; MHC class I, 4-1BBL, and IL15; MHC class II, 4-1BBL, and IL15; MHC class I, CD80, and IL15; MHC class II, CD80, and IL15; MHC class I, CD86, and IL15; MHC class II, CD86, and IL15; MHC class I, CD83, and IL15; MHC class II, CD83, and IL15; MHC class I, CD70, and IL15; MHC class II, CD70, and IL15; MHC class I, LIGHT, and IL15; MHC class II, LIGHT, and IL15; MHC class I, HVEM, and IL15; HC class II, HVEM, and IL15; MHC class I, CD40L, and IL15; MHC class II, CD40L, and IL15; MHC class I, OX40L, and IL15; MHC class II, OX40L, and IL15; MHC class I, TL1A, and IL15; MHC class II, TL1A, and IL15; MHC class I, GITRL, and IL15; MHC class II, GITRL, and IL15; MHC class I, CD30L and IL15; MHC class II, CD30L and IL15; MHC class I, 4-1BBL, and IL7; MHC class II, 4-1BBL, and IL7; MHC class I, CD80, and IL7; MHC class II, CD80, and IL7; MHC class I, CD86, and IL7; MHC class II, CD86, and IL7; MHC class I, CD83, and IL7; MHC class II, CD83, and IL7; MHC class I, CD70, and IL7; MHC class II, CD70, and IL7; MHC class I, LIGHT, and IL7; MHC class II, LIGHT, and IL7; MHC class I, HVEM, and IL7; MHC class II, HVEM, and IL7; MHC class I, CD40L, and IL7; MHC class II, CD40L, and IL7; MHC class I, OX40L, and IL7; MHC class II, OX40L, and IL7; MHC class I, TL1A, and IL7; MHC class II, TL1A, and IL7; MHC class I, GITRL, and IL7; MHC class II, GITRL, and IL7; MHC class I, CD30L and IL7; MHC class II, CD30L and IL7; MHC class I, 4-1BBL, and IL12; MHC class II, 4-1BBL, and IL12; MHC class I, CD80, and IL12; MHC class II, CD80, and IL12; MHC class I, CD86, and IL12; MHC class II, CD86, and IL12; MHC class I, CD83, and IL12; MHC class II, CD83, and IL12; MHC class I, CD70, and IL12; MHC class II, CD70, and IL12; MHC class I, LIGHT, and IL12; MHC class II, LIGHT, and IL12; MHC class I, HVEM, and IL12; MHC class II, HVEM, and IL12; MHC class I, CD40L, and IL12; MHC class II, CD40L, and IL12; MHC class I, OX40L, and IL12; MHC class II, OX40L, and IL12; MHC class I, TL1A, and IL12; MHC class II, TL1A, and IL12; MHC class I, GITRL, and IL12; MHC class II, GITRL, and IL12; MHC class I, CD30L and IL12; MHC class II, CD30L and IL12; MHC class I, 4-1BBL, and IL18; MHC class II, 4-1BBL, and IL18; MHC class I, CD80, and IL18; MHC class II, CD80, and IL18; MHC class I, CD86, and IL18; MHC class II, CD86, and IL18; MHC class I, CD83, and IL18; MHC class II, CD83, and IL18; MHC class I, CD70, and IL18; MHC class II, CD70, and IL18; MHC class I, LIGHT, and IL18; MHC class II, LIGHT, and IL18; MHC class I, HVEM, and IL18; MHC class II, HVEM, and IL18; MHC class I, CD40L, and IL18; MHC class II, CD40L, and IL18; MHC class I, OX40L, and IL18; MHC class II, OX40L, and IL18; MHC class I, TL1A, and IL18; MHC class II, TL1A, and IL18; MHC class I, GITRL, and IL18; MHC class II, GITRL, and IL18; MHC class I, CD30L and IL18; MHC class II, CD30L and IL18; MHC class I, 4-1BBL, and IL21; MHC class II, 4-1BBL, and IL21; MHC class I, CD80, and IL21; MHC class II, CD80, and IL21; MHC class I, CD86, and IL21; MHC class II, CD86, and IL21; MHC class I, CD83, and IL21; MHC class II, CD83, and IL21; MHC class I, CD70, and IL21; MHC class II, CD70, and IL21; MHC class I, LIGHT, and IL21; MHC class II, LIGHT, and IL21; MHC class I, HVEM, and IL21; MHC class II, HVEM, and IL21; MHC class I, CD40L, and IL21; MHC class II, CD40L, and IL21; MHC class I, OX40L, and IL21; MHC class II, OX40L, and IL21; MHC class I, TL1A, and IL21; MHC class II, TL1A, and IL21; MHC class I, GITRL, and IL21; MHC class II, GITRL, and IL21; MHC class I, CD30L and IL21; MHC class II, CD30L and IL21; MHC class I, 4-1BBL, and IL4; MHC class II, 4-1BBL, and IL4; MHC class I, CD80, and IL4; MHC class II, CD80, and IL4; MHC class I, CD86, and IL4; MHC class II, CD86, and IL4; MHC class I, CD83, and IL4; MHC class II, CD83, and IL4; MHC class I, CD70, and IL4; MHC class II, CD70, and IL4; MHC class I, LIGHT, and IL4; MHC class II, LIGHT, and IL4; MHC class I, HVEM, and IL4; MHC class II, HVEM, and IL4; MHC class I, CD40L, and IL4; MHC class II, CD40L, and IL4; MHC class I, OX40L, and IL4; MHC class II, OX40L, and IL4; MHC class I, TL1A, and IL4; MHC class II, TL1A, and IL4; MHC class I, GITRL, and IL4; MHC class II, GITRL, and IL4; MHC class I, CD30L and IL4; MHC class II, CD30L and IL4; MHC class I, 4-1BBL, and IL6; MHC class II, 4-1BBL, and IL6; MHC class I, CD80, and IL6; MHC class II, CD80, and IL6; MHC class I, CD86, and IL6; MHC class II, CD86, and IL6; MHC class I, CD83, and IL6; MHC class II, CD83, and IL6; MHC class I, CD70, and IL6; MHC class II, CD70, and IL6; MHC class I, LIGHT, and IL6; MHC class II, LIGHT, and IL6; MHC class I, HVEM, and IL6; MHC class II, HVEM, and IL6; MHC class I, CD40L, and IL6; MHC class II, CD40L, and IL6; MHC class I, OX40L, and IL6; MHC class II, OX40L, and IL6; MHC class I, TL1A, and IL6; MHC class II, TL1A, and IL6; MHC class I, GITRL, and IL6; MHC class II, GITRL, and IL6; MHC class I, CD30L and IL6; MHC class II, CD30L and IL6; MHC class I, 4-1BBL, and IL23; MHC class II, 4-1BBL, and IL23; MHC class I, CD80, and IL23; MHC class II, CD80, and IL23; MHC class I, CD86, and IL23; MHC class II, CD86, and IL23; MHC class I, CD83, and IL23; MHC class II, CD83, and IL23; MHC class I, CD70, and IL23; MHC class II, CD70, and IL23; MHC class I, LIGHT, and IL23; MHC class II, LIGHT, and IL23; MHC class I, HVEM, and IL23; MHC class II, HVEM, and IL23; MHC class I, CD40L, and IL23; MHC class II, CD40L, and IL23; MHC class I, OX40L, and IL23; MHC class II, OX40L, and IL23; MHC class I, TL1A, and IL23; MHC class II, TL1A, and IL23; MHC class I, GITRL, and IL23; MHC class II, GITRL, and IL23; MHC class I, CD30L and IL23; MHC class II, CD30L and IL23; MHC class I, 4-1BBL, and IL27; MHC class II, 4-1BBL, and IL27; MHC class I, CD80, and IL27; MHC class II, CD80, and IL27; MHC class I, CD86, and IL27; MHC class II, CD86, and IL27; MHC class I, CD83, and IL27; MHC class II, CD83, and IL27; MHC class I, CD70, and IL27; MHC class II, CD70, and IL27; MHC class I, LIGHT, and IL27; MHC class II, LIGHT, and IL27; MHC class I, HVEM, and IL27; MHC class II, HVEM, and IL27; MHC class I, CD40L, and IL27; MHC class II, CD40L, and IL27; MHC class I, OX40L, and IL27; MHC class II, OX40L, and IL27; MHC class I, TL1A, and IL27; MHC class II, TL1A, and IL27; MHC class I, GITRL, and IL27; MHC class II, GITRL, and IL27; MHC class I, CD30L and IL27; MHC class II, CD30L and IL27; MHC class I, 4-1BBL, and IL17; MHC class II, 4-1BBL, and IL17; MHC class I, CD80, and IL17; MHC class II, CD80, and IL17; MHC class I, CD86, and IL17; MHC class II, CD86, and IL17; MHC class I, CD83, and IL17; MHC class II, CD83, and IL17; MHC class I, CD70, and IL17; MHC class II, CD70, and IL17; MHC class I, LIGHT, and IL17; MHC class II, LIGHT, and IL17; MHC class I, HVEM, and IL17; MHC class II, HVEM, and IL17; MHC class I, CD40L, and IL17; MHC class II, CD40L, and IL17; MHC class I, OX40L, and IL17; MHC class II, OX40L, and IL17; MHC class I, TL1A, and IL17; MHC class II, TL1A, and IL17; MHC class I, GITRL, and IL17; MHC class II, GITRL, and IL17; MHC class I, CD30L and IL17; MHC class II, CD30L and IL17; MHC class I, 4-1BBL, and IL10; MHC class II, 4-1BBL, and IL10; MHC class I, CD80, and IL10; MHC class II, CD80, and IL10; MHC class I, CD86, and IL10; MHC class II, CD86, and IL10; MHC class I, CD83, and IL10; MHC class II, CD83, and IL10; MHC class I, CD70, and IL10; MHC class II, CD70, and IL10; MHC class I, LIGHT, and IL10; MHC class II, LIGHT, and IL10; MHC class I, HVEM, and IL10; MHC class II, HVEM, and IL10; MHC class I, CD40L, and IL10; MHC class II, CD40L, and IL10; MHC class I, OX40L, and IL10; MHC class II, OX40L, and IL10; MHC class I, TL1A, and IL10; MHC class II, TL1A, and IL10; MHC class I, GITRL, and IL10; MHC class II, GITRL, and IL10; MHC class I, CD30L and IL10; MHC class II, CD30L and IL10; MHC class I, 4-1BBL, and TGF-beta; MHC class II, 4-1BBL, and TGF-beta; MHC class I, CD80, and TGF-beta; MHC class II, CD80, and TGF-beta; MHC class I, CD86, and TGF-beta; MHC class II, CD86, and TGF-beta; MHC class I, CD83, and TGF-beta; MHC class II, CD83, and TGF-beta; MHC class I, CD70, and TGF-beta; MHC class II, CD70, and TGF-beta; MHC class I, LIGHT, and TGF-beta; MHC class II, LIGHT, and TGF-beta; MHC class I, HVEM, and TGF-beta; MHC class II, HVEM, and TGF-beta; MHC class I, CD40L, and TGF-beta; MHC class II, CD40L, and TGF-beta; MHC class I, OX40L, and TGF-beta; MHC class II, OX40L, and TGF-beta; MHC class I, TL1A, and TGF-beta; MHC class II, TL1A, and TGF-beta; MHC class I, GITRL, and TGF-beta; MHC class II, GITRL, and TGF-beta; MHC class I, CD30L and TGF-beta; MHC class II, CD30L and TGF-beta; MHC class I, 4-1BBL, and IFN-gamma; MHC class II, 4-1BBL, and IFN-gamma; MHC class I, CD80, and IFN-gamma; MHC class II, CD80, and IFN-gamma; MHC class I, CD86, and IFN-gamma; MHC class II, CD86, and IFN-gamma; MHC class I, CD83, and IFN-gamma; MHC class II, CD83, and IFN-gamma; MHC class I, CD70, and IFN-gamma; MHC class II, CD70, and IFN-gamma; MHC class I, LIGHT, and IFN-gamma; MHC class II, LIGHT, and IFN-gamma; MHC class I, HVEM, and IFN-gamma; MHC class II, HVEM, and IFN-gamma; MHC class I, CD40L, and IFN-gamma; MHC class II, CD40L, and IFN-gamma; MHC class I, OX40L, and IFN-gamma; MHC class II, OX40L, and IFN-gamma; MHC class I, TL1A, and IFN-gamma; MHC class II, TL1A, and IFN-gamma; MHC class I, GITRL, and IFN-gamma; MHC class II, GITRL, and IFN-gamma; MHC class I, CD30L and IFN-gamma; MHC class II, CD30L and IFN-gamma; MHC class I, 4-1BBL, and IL-1 beta; MHC class II, 4-1BBL, and IL-1 beta; MHC class I, CD80, and IL-1 beta; MHC class II, CD80, and IL-1 beta; MHC class I, CD86, and IL-1 beta; MHC class II, CD86, and IL-1 beta; MHC class I, CD83, and IL-1 beta; MHC class II, CD83, and IL-1 beta; MHC class I, CD70, and IL-1 beta; MHC class II, CD70, and IL-1 beta; MHC class I, LIGHT, and IL-1 beta; MHC class II, LIGHT, and IL-1 beta; MHC class I, HVEM, and IL-1 beta; MHC class II, HVEM, and IL-1 beta; MHC class I, CD40L, and IL-1 beta; MHC class II, CD40L, and IL-1 beta; MHC class I, OX40L, and IL-1 beta; MHC class II, OX40L, and IL-1 beta; MHC class I, TL1A, and IL-1 beta; MHC class II, TL1A, and IL-1 beta; MHC class I, GITRL, and IL-1 beta; MHC class II, GITRL, and IL-1 beta; MHC class I, CD30L and IL-1 beta; MHC class II, CD30L and IL-1 beta; MHC class I, 4-1BBL, and GM-CSF; MHC class II, 4-1BBL, and GM-CSF; MHC class I, CD80, and GM-CSF; MHC class II, CD80, and GM-CSF; MHC class I, CD86, and GM-CSF; MHC class II, CD86, and GM-CSF; MHC class I, CD83, and GM-CSF; MHC class II, CD83, and GM-CSF; MHC class I, CD70, and GM-CSF; MHC class II, CD70, and GM-CSF; MHC class I, LIGHT, and GM-CSF; MHC class II, LIGHT, and GM-CSF; MHC class I, HVEM, and GM-CSF; MHC class II, HVEM, and GM-CSF; MHC class I, CD40L, and GM-CSF; MHC class II, CD40L, and GM-CSF; MHC class I, OX40L, and GM-CSF; MHC class II, OX40L, and GM-CSF; MHC class I, TL1A, and GM-CSF; MHC class II, TL1A, and GM-CSF; MHC class I, GITRL, and GM-CSF; MHC class II, GITRL, and GM-CSF; MHC class I, CD30L and GM-CSF; MHC class II, CD30L and GM-CSF; MHC class I, 4-1BBL, and IL-25; MHC class II, 4-1BBL, and IL-25; MHC class I, CD80, and IL-25; MHC class II, CD80, and IL-25; MHC class I, CD86, and IL-25; MHC class II, CD86, and IL-25; MHC class I, CD83, and IL-25; MHC class II, CD83, and IL-25; MHC class I, CD70, and IL-25; MHC class II, CD70, and IL-25; MHC class I, LIGHT, and IL-25; MHC class II, LIGHT, and IL-25; MHC class I, HVEM, and IL-25; MHC class II, HVEM, and IL-25; MHC class I, CD40L, and IL-25; MHC class II, CD40L, and IL-25; MHC class I, OX40L, and IL-25; MHC class II, OX40L, and IL-25; MHC class I, TL1A, and IL-25; MHC class II, TL1A, and IL-25; MHC class I, GITRL, and IL-25; MHC class II, GITRL, and IL-25; MHC class I, CD30L and IL-25; or MHC class II, CD30L and IL-25.

[0450] It will be understood that for any of the foregoing combinations of Signal 1, Signal 2 and/or Signal 3, the MHC class I molecule can be any MHC class I antigen presenting polypeptide or MHC class I single chain fusion polypeptide described herein. Similarly, it will be understood that for any of the foregoing combinations of Signal 1, Signal 2 and/or Signal 3, the MHC class II molecule can be any MHC class II antigen presenting polypeptide or MHC class I single chain fusion polypeptide described herein.

### Cell Adhesion Molecules

[0451] In some embodiments, in addition to Signal 1, Signal 2 and/or Signal 3, the aAPCs described herein further comprise at the cell surface one or more exogenous polypeptides comprising cell adhesion molecules. Cell adhesion molecules further facilitate the interation between T-cells and the aAPCs. In some embodiments, the cell adhesion molecules mediate or facilitate the formation of the immunological synapse. In some embodiments, the one or more cell adhesion molecule is selected from the group consisting of ICAM4/LW, CD36, CD58/LFA3, CD47, VLA4, BCAM/Lu, CD44, CD99/MIC2, ICAM1, JAM1 and CD147, or any combination thereof.

[0452] In some embodiments, the aAPC comprises at the cell surface an exogenous polypeptide comprising Signal 1, an exogenous polypeptide comprising Signal 2, and one or more exogenous polypeptides comprising cell adhesion molecules. In some embodiments, the aAPC comprises at the cell surface an exogenous polypeptide comprising Signal 1, an exogenous polypeptide comprising Signal 2, an exogenous polypeptide comprising Signal 3, and one or more exogenous polypeptides comprising cell adhesion molecules.

[0453] In some embodiments, the aAPC comprises at the cell surface more than one exogenous polypeptide comprising more than one Signal 1, an exogenous polypeptide comprising Signal 2, and one or more exogenous polypeptides comprising cell adhesion molecules. In some embodiments, the aAPC comprises at the cell surface more than one exogenous polypeptide comprising more than one Signal 1, an exogenous polypeptide comprising Signal 2, an exogenous polypeptide comprising Signal 3, and one or more exogenous polypeptides comprising cell adhesion molecules.

[0454] In some embodiments, the aAPC comprises at the cell surface an exogenous polypeptide comprising Signal 1, more than one exogenous polypeptide comprising more than one Signal 2, and one or more exogenous polypeptides comprising cell adhesion molecules. In some embodiments, the aAPC comprises at the cell surface an exogenous polypeptide comprising Signal 1, more than one exogenous polypeptide comprising more than one Signal 2, an exogenous polypeptide comprising Signal 3, and one or more exogenous polypeptides comprising cell adhesion molecules.

[0455] In some embodiments, the aAPC comprises at the cell surface an exogenous polypeptide comprising Signal 1, an exogenous polypeptide comprising Signal 2, more than one exogenous polypeptide comprising more than one Signal 3, and one or more exogenous polypeptides comprising cell adhesion molecules.

[0456] In some embodiments, the aAPC comprises at the cell surface more than one exogenous polypeptide comprising more than one Signal 1, an exogenous polypeptide comprising Signal 2, more than one exogenous polypeptide comprising more than one Signal 3, and one or more exogenous polypeptides comprising cell adhesion molecules.

[0457] In some embodiments, the aAPC comprises at the cell surface more than one exogenous polypeptide comprising more than one Signal 1, more than one exogenous polypeptide comprising more than one Signal 2, an exogenous polypeptide comprising Signal 3, and one or more exogenous polypeptides comprising cell adhesion molecules.

[0458] In some embodiments, the aAPC comprises at the cell surface more than one exogenous polypeptide comprising more than one Signal 1, more than one exogenous polypeptide comprising more than one Signal 2, more than one exogenous polypeptide comprising more than one Signal 3, and one or more exogenous polypeptides comprising cell adhesion molecules.

[0459] In some embodiments, the one or more exogenous polypeptides comprising Signal 1, the one or more exogenous polypeptides comprising Signal 2, the one or more exogenous polypeptides comprising Signal 3, and the one or more exogenous polypeptides comprising cell adhesion molecules are selected from the exogenous polypeptides shown in Table 8.

TABLE 8
Cell Adhesion Molecules

| | |
|---|---|
| Signal 1 | MHC class I; and MHC class II |
| Signal 2 | 4-1BBL; CD80; CD86; CD83; CD70; |
| | LIGHT; HVEM; CD40L; OX40L; TL1A; |
| | GITRL; and CD30L |
| Signal 3 | IL2; IL15; IL7; IL12; IL18; IL21; IL4; IL6; |
| | IL23; IL27; IL17; IL10; TGF-beta; IFN- |
| | gamma; IL-1 beta; GM-CSF; and IL-25 |
| Adhesion | ICAM4/LW; CD36; CD58/LFA3; CD47; |
| Molecules | VLA4; BCAM/Lu; CD44; CD99/MIC2; |
| | ICAM1; JAM1 and CD147 |

[0460] In embodiments where the aAPC comprises a polypeptide comprising Signal 1 and a polypeptide comprising Signal 2, the polypeptides can be present on the surface of the aAPC in different configurations, e.g., as shown in FIG. 17A. In some embodiments, the polypeptide comprising Signal 1 and polypeptide comprising Signal 2 are present as independent, separate polypeptides (e.g., each polypeptide comprising an anchor) and, e.g., are encoded by nucleic acids present on two separate lentiviral vectors which are used to serially transduce or co-transduce the erythroid precursor cell (two lenti-vector).

[0461] In some embodiments, the polypeptide comprising Signal 1 and polypeptide comprising Signal 2 are present as a fusion polypeptide, e.g., connected or tethered by a linker sequence, wherein each polypeptide comprises an anchor (signal 1+2 as a fusion). In these embodiments, the fusion polypeptide is encoded by a single lentiviral vector which is used to transduce the erythroid precursor cell.

[0462] In some embodiments, the polypeptide comprising Signal 1 and polypeptide comprising Signal 2 are present on the surface of the cell (e.g, each polypeptide comprising an anchor) wherein the polypeptides are separated by a viral-derived 2A element. Multiple 2A elements are known in the art and can be used as described herein, including T2A, P2A, E2A, and F2A (see, e.g., Liu et al. (2017) Sci. Rep. 7(1): 2193, incorporated in its entirety herein by reference). In some embodiments the polypeptide comprising Signal 1 and polypeptide comprising Signal 2 are separated by T2A (Skip T2A tag). In these embodiments, the polypeptides are encoded by a single lentiviral vector which is used to transduce the erythroid precursor cell.

[0463] In embodiments where the aAPC comprises a polypeptide comprising Signal 1, a polypeptide comprising Signal 2 and a polypeptide comprising Signal 3, the polypeptides can be present on the surface of the aAPC in different configurations, e.g., as shown in FIG. 17. In some embodiments, the polypeptide comprising Signal 1 and the polypeptide comprising Signal 2 are present as a fusion polypeptide, e.g., connected by a linker, and the polypeptide comprising Signal 3 is a separate polypeptide (option 1). In some embodiments, the polypeptide comprising Signal 1 and the polypeptide comprising Signal 3 are present as a fusion polypeptide, e.g., connected by a linker, and the polypeptide comprising Signal 2 is a separate polypeptide (option 2). In some embodiments, the polypeptide comprising Signal 2 and the polypeptide comprising Signal 3 are present as a fusion polypeptide, e.g., connected by a linker, and the polypeptide comprising Signal 1 is a separate polypeptide (option 3). In these embodiments, it will be understood that, when preparing the aAPCs, the fusion polypeptide (comprising Signals 1 and 2, Signals 2 and 3, or Signals 1 and 3) can be encoded by one lentiviral vector, and the separate polypeptide (Signal 1, Signal 2 or Signal 3) can be encoded by a second lentiviral vector.

[0464] In some embodiments, the tether or linker between Signal 1 and Signal 2, between Signal 1 and Signal 3, or between Signal 2 and Signal 3 is a poly-GlySer linker. In some embodiments, the tether or linker between Signal 1 and Signal 2, between Signal 1 and Signal 3, or between Signal 2 and Signal 3 is a snorkel linker.

[0465] Examples of exemplary fusion constructs comprising Signal 1 and Signal 2 are provided in Table 9 below.

TABLE 9
Constructs

| | | SEQ ID |
|---|---|---|
| Description | Amino Acid Sequence | NO: |
| Beta 2 microglobulin | MSRSVALAVLALLSLSGLEA | 730 |
| leader | | |
| HPV16 E7₁₁₋₁₉ | YMLDLQPET | 713 |
| peptide | | |
| linker between | GGGGSGGGGSGGGGS | 732 |
| peptide and Beta 2 | | |
| microglobulin | | |
| beta 2 microglobulin | IQRTPKIQVYSRHPAENGKSNFLNCYVSGFHPSDIEVDLLKNGERIEKVEHS | 839 |
| (without leader) | DLSFSKDWSFYLLYYTEFTPTEKDEYACRVNHVTLSQPKIVKWDRDM | |
| linker between Beta | GGGGSGGGGSGGGGSGGGGS | 733 |
| 2 microglobulin and | | |
| HLA-A*0201 | | |
| HLA-A*0201 Y84A | GSHSMRYFFTSVSRPGRGEPRFIAVGYVDDTQFVRFDSDAASQRMEPRAP | 840 |
| | WIEQEGPEYWDGETRKVKAHSQTHRVDLGTLRGAYNQSEAGSHTVQRM | |
| | YGCDVGSDWRFLRGYHQYAYDGKDYIALKEDLRSWTAADMAAQTTKHK | |
| | WEAAHVAEQLRAYLEGTCVEWLRRYLENGKETLQRTDAPKTHMTHHAVS | |
| | DHEATLRCWALSFYPAEITLTWQRDGEDQTQDTELVETRPAGDGTFQKW | |
| | AAVVVPSGQEQRYTCHVQHEGLPKPLTLRWEPSSQPTIPI | |
| linker between HLA- | GSGSGSGSEDGSGSGSGS | 734 |
| A*0201 and | | |
| Glycophorin A | | |
| linker between HLA- | GSGSGSGSGSGSGSGSGS | 735 |
| A*0201 and | | |
| Glycophorin A | | |
| Glycophorin A | LSTTEVAMHTSTSSSVTKSYISSQTNDTHKR DTYAATP RAHEVSEISVRTVY | 728 |
| | PPEEETGERVQLAHHFSEPEITLIIFGVMAGVIGTILLISYGIRRLIKKSPSDVK | |
| | PLPSPDTDVPLSSVEIENPETSDQ | |
| HLA-A*0201 | GSHSMRYFFTSVSRPGRGEPRFIAVGYVDDTQFVRFDSDAASQRMEPRAP | 841 |
| | WIEQEGPEYWDGETRKVKAHSQTHRVDLGTLRGYYNQSEAGSHTVQRM | |
| | YGCDVGSDWRFLRGYHQYAYDGKDYIALKEDLRSWTAADMAAQTTKHK | |
| | WEAAHVAEQLRAYLEGTCVEWLRRYLENGKETLQRTDAPKTHMTHHAVS | |
| | DHEATLRCWALSFYPAEITLTWQRDGEDQTQDTELVETRPAGDGTFQKW | |
| | AAVVVPSGQEQRYTCHVQHEGLPKPLTLRWEPSSQPTIPI | |
| HLA-A*0201 Y84C | GSHSMRYFFTSVSRPGRGEPRFIAVGYVDDTQFVRFDSDAASQRMEPRAP | 842 |
| | WIEQEGPEYWDGETRKVKAHSQTHRVDLGTLRGCYNQSEAGSHTVQRM | |
| | YGCDVGSDWRFLRGYHQYAYDGKDYIALKEDLRSWTAADMAAQTTKHK | |
| | WEAAHVAEQLRAYLEGTCVEWLRRYLENGKETLQRTDAPKTHMTHHAVS | |
| | DHEATLRCWALSFYPAEITLTWQRDGEDQTQDTELVETRPAGDGTFQKW | |
| | AAVVVPSGQEQRYTCHVQHEGLPKPLTLRWEPSSQPTIPI | |
| linker between | GCGGSGGGGSGGGGS | 736 |
| peptide and Beta 2 | | |
| microglobulin | | |
| Fusion polypeptide | MSRSVALAVLALLSLSGLEAYMLDLQPETGGGGSGGGGSGGGGSIQRTPK | 843 |
| comprising Beta 2 | IQVYSRHPAENGKSNFLNCYVSGFHPSDIEVDLLKNGERIEKVEHSDLSFSK | |
| microglobulin leader | DWSFYLLYYTEFTPTEKDEYACRVNHVTLSQPKIVKWDRDMGGGGSGGG | |
| sequence (B2ML)- | GSGGGGSGGGGSGSHSMRYFFTSVSRPGRGEPRFIAVGYVDDTQFVRFD | |
| HPV16 E7₁₁₋₁₉ | SDAASQRMEPRAPWIEQEGPEYWDGETRKVKAHSQTHRVDLGTLRGYY | |
| peptide-Beta 2 | NQSEAGSHTVQRMYGCDVGSDWRFLRGYHQYAYDGKDYIALKEDLRSW | |
| microglobulin (B2M)- | TAADMAAQTTKHKWEAAHVAEQLRAYLEGTCVEWLRRYLENGKETLQR | |
| HLA-A*02:01 | TDAPKTHMTHHAVSDHEATLRCWALSFYPAEITLTWQRDGEDQTQDTEL | |
| | VETRPAGDGTFQKWAAVVVPSGQEQRYTCHVQHEGLPKPLTLRWEPSS | |
| | QPTIPIGSGSGSGSEDGSGSGSGS | |
| Fusion polypeptide | MSRSVALAVLALLSLSGLEAYMLDLQPETGGGGSGGGGSGGGGSIQRTPK | 844 |
| comprising B2ML- | IQVYSRHPAENGKSNFLNCYVSGFHPSDIEVDLLKNGERIEKVEHSDLSFSK | |
| HPV16 E7₁₁₋₁₉ | DWSFYLLYYTEFTPTEKDEYACRVNHVTLSQPKIVKWDRDMGGGGSGGG | |
| peptide-B2M- | GSGGGGSGGGGSGSHSMRYFFTSVSRPGRGEPRFIAVGYVDDTQFVRFD | |
| HLA-A*02:01 Y84A | SDAASQRMEPRAPWIEQEGPEYWDGETRKVKAHSQTHRVDLGTLRGAY | |
| | NQSEAGSHTVQRMYGCDVGSDWRFLRGYHQYAYDGKDYIALKEDLRSW | |
| | TAADMAAQTTKHKWEAAHVAEQLRAYLEGTCVEWLRRYLENGKETLQR | |
| | TDAPKTHMTHHAVSDHEATLRCWALSFYPAEITLTWQRDGEDQTQDTEL | |
| | VETRPAGDGTFQKWAAVVVPSGQEQRYTCHVQHEGLPKPLTLRWEPSS | |
| | QPTIPIGSGSGSGSEDGSGSGSGS | |
| Fusion polypeptide | MSRSVALAVLALLSLSGLEAYMLDLQPETGCGGSGGGGSGGGGSIQRTPK | 845 |
| comprising B2ML- | IQVYSRHPAENGKSNFLNCYVSGFHPSDIEVDLLKNGERIEKVEHSDLSFSK | |
| HPV16 E7₁₁₋₁₉ | DWSFYLLYYTEFTPTEKDEYACRVNHVTLSQPKIVKWDRDMGGGGSGGG | |
| peptide-B2M- | GSGGGGSGGGGSGSHSMRYFFTSVSRPGRGEPRFIAVGYVDDTQFVRFD | |
| HLA-A*02:01 Y84C | SDAASQRMEPRAPWIEQEGPEYWDGETRKVKAHSQTHRVDLGTLRGCY | |
| | NQSEAGSHTVQRMYGCDVGSDWRFLRGYHQYAYDGKDYIALKEDLRSW | |
| | TAADMAAQTTKHKWEAAHVAEQLRAYLEGTCVEWLRRYLENGKETLQR | |
| | TDAPKTHMTHHAVSDHEATLRCWALSFYPAEITLTWQRDGEDQTQDTEL | |
| | VETRPAGDGTFQKWAAVVVPSGQEQRYTCHVQHEGLPKPLTLRWEPSS | |
| | QPTIPIGSGSGSGSEDGSGSGSGS | |
| Fusion polypeptide | MSRSVALAVLALLSLSGLEAYMLDLQPETGGGGSGGGGSGGGGSIQRTPK | 726 |
| comprising B2ML- | IQVYSRHPAENGKSNFLNCYVSGFHPSDIEVDLLKNGERIEKVEHSDLSFSK | |
| HPV16 E711₁₁₋₁₉ | DWSFYLLYYTEFTPTEKDEYACRVNHVTLSQPKIVKWDRDMGGGGSGGG | |
| peptide-B2M- | GSGGGGSGGGGSGSHSMRYFFTSVSRPGRGEPRFIAVGYVDDTQFVRFD | |
| HLA-A*02:01- | SDAASQRMEPRAPWIEQEGPEYWDGETRKVKAHSQTHRVDLGTLRGYY | |
| Glycophorin A (GPA) | NQSEAGSHTVQRMYGCDVGSDWRFLRGYHQYAYDGKDYIALKEDLRSW | |
| | TAADMAAQTTKHKWEAAHVAEQLRAYLEGTCVEWLRRYLENGKETLQR | |
| | TDAPKTHMTHHAVSDHEATLRCWALSFYPAEITLTWQRDGEDQTQDTEL | |
| | VETRPAGDGTFQKWAAVVVPSGQEQRYTCHVQHEGLPKPLTLRWEPSS | |
| | QPTIPIGSGSGSGSEDGSGSGSGSLSTTEVAMHTSTSSSVTKSYISSQTNDT | |
| | HKRDTYAATPRAHEVSEISVRTVYPPEEETGERVQLAHHFSEPEITLIIFGVM | |
| | AGVIGTILLISYGIRRLIKKSPSDVKPLPSPDTDVPLSSVEIENPETSDQ | |
| Fusion polypeptide | MSRSVALAVLALLSLSGLEAYMLDLQPETGGGGSGGGGSGGGGSIQRTPK | 846 |
| comprising B2ML- | IQVYSRHPAENGKSNFLNCYVSGFHPSDIEVDLLKNGERIEKVEHSDLSFSK | |
| HPV16 E7₁₁₋₁₉ | DWSFYLLYYTEFTPTEKDEYACRVNHVTLSQPKIVKWDRDMGGGGSGGG | |
| peptide-B2M- | GSGGGGSGGGGSGSHSMRYFFTSVSRPGRGEPRFIAVGYVDDTQFVRFD | |
| HLA-A*02:01 Y84A- | SDAASQRMEPRAPWIEQEGPEYWDGETRKVKAHSQTHRVDLGTLRGAY | |
| GPA | NQSEAGSHTVQRMYGCDVGSDWRFLRGYHQYAYDGKDYIALKEDLRSW | |
| | TAADMAAQTTKHKWEAAHVAEQLRAYLEGTCVEWLRRYLENGKETLQR | |
| | TDAPKTHMTHHAVSDHEATLRCWALSFYPAEITLTWQRDGEDQTQDTEL | |
| | VETRPAGDGTFQKWAAVVVPSGQEQRYTCHVQHEGLPKPLTLRWEPSS | |
| | QPTIPIGSGSGSGSEDGSGSGSGSLSTTEVAMHTSTSSSVTKSYISSQTNDT | |
| | HKRDTYAATPRAHEVSEISVRTVYPPEEETGERVQLAHHFSEPEITLIIFGVM | |
| | AGVIGTILLISYGIRRLIKKSPSDVKPLPSPDTDVPLSSVEIENPETSDQ | |
| Fusion polypeptide | MSRSVALAVLALLSLSGLEAYMLDLQPETGCGGSGGGGSGGGGSIQRTPK | 847 |
| comprising B2ML- | IQVYSRHPAENGKSNFLNCYVSGFHPSDIEVDLLKNGERIEKVEHSDLSFSK | |
| HPV16 E711₁₁₋₁₉ | DWSFYLLYYTEFTPTEKDEYACRVNHVTLSQPKIVKWDRDMGGGGSGGG | |
| peptide-B2M- | GSGGGGSGGGGSGSHSMRYFFTSVSRPGRGEPRFIAVGYVDDTQFVRFD | |
| HLA-A*02:01 Y84C- | SDAASQRMEPRAPWIEQEGPEYWDGETRKVKAHSQTHRVDLGTLRGCY | |
| GPA | NQSEAGSHTVQRMYGCDVGSDWRFLRGYHQYAYDGKDYIALKEDLRSW | |
| | TAADMAAQTTKHKWEAAHVAEQLRAYLEGTCVEWLRRYLENGKETLQR | |
| | TDAPKTHMTHHAVSDHEATLRCWALSFYPAEITLTWQRDGEDQTQDTEL | |
| | VETRPAGDGTFQKWAAVVVPSGQEQRYTCHVQHEGLPKPLTLRWEPSS | |
| | QPTIPIGSGSGSGSEDGSGSGSGSLSTTEVAMHTSTSSSVTKSYISSQTNDT | |
| | HKRDTYAATPRAHEVSEISVRTVYPPEEETGERVQLAHHFSEPEITLIIFGVM | |
| | AGVIGTILLISYGIRRLIKKSPSDVKPLPSPDTDVPLSSVEIENPETSDQ | |
| Fusion polypeptide comprising beta 2 microglobulin leader (B2ML)-HPV16 E7₁₁₋₁₉ | | |
| peptide-linker-beta 2 microglobulin (B2M)-linker-HLA-A*02:01 Y84A-linker-GPA- | | |
| T2A-GPA signal peptide-4-1BBL-linker v17-GPA | | |
| Beta 2 | MSRSVALAVLALLSLSGLEAYMLDLQPETGGGGSGGGGSGGGGSIQRTPKIQ | 848 |
| microglobulin | VYSRHPAENGKSNFLNCYVSGFHPSDIEVDLLKNGERIEKVEHSDLSFSKDWSF | |
| leader (B2ML)- | YLLYYTEFTPTEKDEYACRVNHVTLSQPKIVKWDRDMGGGGSGGGGSGGGG | |
| HPV16 E711₁₁₋₁₉ | SGGGGSGSHSMRYFFTSVSRPGRGEPRFIAVGYVDDTQFVRFDSDAASQRM | |
| peptide-linker- | EPRAPWIEQEGPEYWDGETRKVKAHSQTHRVDLGTLRGAYNQSEAGSHTV | |
| Beta 2 | QRMYGCDVGSDWRFLRGYHQYAYDGKDYIALKEDLRSWTAADMAAQTTK | |
| microglobulin | HKWEAAHVAEQLRAYLEGTCVEWLRRYLENGKETLQRTDAPKTHMTHHAV | |
| (B2M)-linker- | SDHEATLRCWALSFYPAEITLTWQRDGEDQTQDTELVETRPAGDGTFQKWA | |
| HLA-A*02:01 | AVVVPSGQEQRYTCHVQHEGLPKPLTLRWEPSSQPTIPIGSGSGSGSEDGSGS | |
| Y84A-linker- | GSGSLSTTEVAMHTSTSSSVTKSYISSQTNDTHKRDTYAATPRAHEVSEISVRT | |
| GPA-T2A-GPA | VYPPEEETGERVQLAHHFSEPEITLIIFGVMAGVIGTILLISYGIRRLIKKSPSDVK | |
| signal peptide- | PLPSPDTDVPLSSVEIENPETSDQGSGEGRGSLLTCGDVEENPGPMYGKIIFVL | |
| N-terminal | LLSEIVSISAACPWAVSGARASPGSAASPRLREGPELSPDDPAGLLDLRQGMF | |
| truncated 4-1BBL | AQLVAQNVLLIDGPLSWYSDPGLAGVSLTGGLSYKEDTKELVVAKAGVYYVFF | |
| linker v17- | QLELRRVVAGEGSGSVSLALHLQPLRSAAGAAALALTVDLPPASSEARNSAFG | |
| GPA | FQGRLLHLSAGQRLGVHLHTEARARHAWQLTQGATVLGLFRVTPEIPAGLPS | |
| | PRSEGGSGGSGGGPEDEPGSGSGGGSGGGSLSTTEVAMHTSTSSSVTKSYISS | |
| | QTNDTHKRDTYAATPRAHEVSEISVRTVYPPEEETGERVQLAHHFSEPEITLIIF | |
| | GVMAGVIGTILLISYGIRRLIKKSPSDVKPLPSPDTDVPLSSVEIENPETSDQ | |
| Beta 2 | MSRSVALAVLALLSLSGLEAYMLDLQPETGGGGSGGGGSGGGGSIQRTPKIQ | 849 |
| Microglobulin | VYSRHPAENGKSNFLNCYVSGFHPSDIEVDLLKNGERIEKVEHSDLSFSKDWSF | |
| leader (B2ML)- | YLLYYTEFTPTEKDEYACRVNHVTLSQPKIVKWDRDMGGGGSGGGGSGGGG | |
| HPV16 E7₁₁₋₁₉ | SGGGGSGSHSMRYFFTSVSRPGRGEPRFIAVGYVDDTQFVRFDSDAASQRM | |
| peptide-linker- | EPRAPWIEQEGPEYWDGETRKVKAHSQTHRVDLGTLRGAYNQSEAGSHTV | |
| Beta 2 | QRMYGCDVGSDWRFLRGYHQYAYDGKDYIALKEDLRSWTAADMAAQTTK | |
| microglobulin | HKWEAAHVAEQLRAYLEGTCVEWLRRYLENGKETLQRTDAPKTHMTHHAV | |
| (B2M)-linker- | SDHEATLRCWALSFYPAEITLTWQRDGEDQTQDTELVETRPAGDGTFQKWA | |
| HLA-A*02:01 | AVVVPSGQEQRYTCHVQHEGLPKPLTLRWEPSSQPTIPIGSGSGSGSEDGSGS | |
| Y84A-linker- | GSGSLSTTEVAMHTSTSSSVTKSYISSQTNDTHKRDTYAATPRAHEVSEISVRT | |
| GPA-T2A | VYPPEEETGERVQLAHHFSEPEITLIIFGVMAGVIGTILLISYGIRRLIKKSPSDVK | |
| | PLPSPDTDVPLSSVEIENPETSDQGSGEGRGSLLTCGDVEENPG | |
| GPA signal | PMYGKIIFVLLLSEIVSISAACPWAVSGARASPGSAASPRLREGPELSPDDPAGL | 850 |
| peptide-4-1BBL | LDLRQGMFAQLVAQNVLLIDGPLSWYSDPGLAGVSLTGGLSYKEDTKELVVA | |
| linker v17- | KAGVYYVFFQLELRRVVAGEGSGSVSLALHLQPLRSAAGAAALALTVDLPPAS | |
| GPA | SEARNSAFGFQGRLLHLSAGQRLGVHLHTEARARHAWQLTQGATVLGLFRV | |
| | TPEIPAGLPSPRSEGGSGGSGGGPEDEPGSGSGGGSGGGSLSTTEVAMHTST | |
| | SSSVTKSYISSQTNDTHKRDTYAATPRAHEVSEISVRTVYPPEEETGERVQLAH | |
| | HFSEPEITLIIFGVMAGVIGTILLISYGIRRLIKKSPSDVKPLPSPDTDVPLSSVEIE | |
| | NPETSDQ | |
| GPA signal | MYGKIIFVLLLSEIVSISA | 731 |
| peptide | | |
| N-terminal- | ACPWAVSGARASPGSAASPRLREGPELSPDDPAGLLDLRQGMFAQLVAQNV | 851 |
| truncated 4-1BBL | LLIDGPLSWYSDPGLAGVSLTGGLSYKEDTKELVVAKAGVYYVFFQLELRRVVA | |
| | GEGSGSVSLALHLQPLRSAAGAAALALTVDLPPASSEARNSAFGFQGRLLHLS | |
| | AGQRLGVHLHTEARARHAWQLTQGATVLGLFRVTPEIPAGLPSPRSE | |
| linker_v17 | GGSGGSGGGPEDEPGSGSGGGSGGGS | 852 |
| GPA | LSTTEVAMHTSTSSSVTKSYISSQTNDTHKRDTYAATPRAHEVSEISVRTVYPPE | 728 |
| | EETGERVQLAHHFSEPEITLIIFGVMAGVIGTILLISYGIRRLIKKSPSDVKPLPSP | |
| | DTDVPLSSVEIENPETSDQ | |
| T2A | GSGEGRGSLLTCGDVEENPGP | 853 |
| Fusion polypeptide comprising GPA signal peptide-N-terminal truncated 4-1BBL-linker- | | |
| GPA-T2A-Beta 2 microglobulin leader (B2ML)-HPV16 E711-19 peptide-linker- | | |
| beta 2 microglobulin-linker-HLA-A*02:01 Y84A-linker-GPA | | |
| GPA signal peptide- | MYGKIIFVLLLSEIVSISAACPWAVSGARASPGSAASPRLREGPELSPDDPAG | 854 |
| N-terminal | LLDLRQGMFAQLVAQNVLLIDGPLSWYSDPGLAGVSLTGGLSYKEDTKELV | |
| truncated 4-1BBL- | VAKAGVYYVFFQLELRRVVAGEGSGSVSLALHLQPLRSAAGAAALALTVDLP | |
| linker-GPA-T2A- | PASSEARNSAFGFQGRLLHLSAGQRLGVHLHTEARARHAWQLTQGATVLG | |
| Beta 2 | LFRVTPEIPAGLPSPRSEGGSGGSGGGPEDEPGSGSGGGSGGGSLSTTEVA | |
| microglobulin | MHTSTSSSVTKSYISSQTNDTHKRDTYAATPRAHEVSEISVRTVYPPEEETGE | |
| leader (B2M14- | RVQLAHHFSEPEITLIIFGVMAGVIGTILLISYGIRRLIKKSPSDVKPLPSPDTDV | |
| HPV16 E7₁₁₋₁₉ | PLSSVEIENPETSDQGSGEGRGSLLTCGDVEENPGPMSRSVALAVLALLSLS | |
| peptide-linker- | GLEAYMLDLQPETGGGGSGGGGSGGGGSIQRTPKIQVYSRHPAENGKSNF | |
| beta 2 | LNCYVSGFHPSDIEVDLLKNGERIEKVEHSDLSFSKDWSFYLLYYTEFTPTEKD | |
| microglobulin- | EYACRVNHVTLSQPKIVKWDRDMGGGGSGGGGSGGGGSGGGGSGSHS | |
| linker-HLA-A*02:01 | MRYFFTSVSRPGRGEPRFIAVGYVDDTQFVRFDSDAASQRMEPRAPWIEQ | |
| Y84A-linker-GPA | EGPEYWDGETRKVKAHSQTHRVDLGTLRGAYNQSEAGSHWQRMYGCDV | |
| | GSDWRFLRGYHQYAYDGKDYIALKEDLRSWTAADMAAQTTKHKWEAAH | |
| | VAEQLRAYLEGTCVEWLRRYLENGKETLQRTDAPKTHMTHHAVSDHEATL | |
| | RCWALSFYPAEITLTWQRDGEDQTQDTELVETRPAGDGTFQKWAAVVVP | |
| | SGQEQRYTCHVQHEGLPKPLTLRWEPSSQPTIPIGSGSGSGSEDGSGSGSGS | |
| | LSTTEVAMHTSTSSSVTKSYISSQTNDTHKRDTYAATPRAHEVSEISVRTVYP | |
| | PEEETGERVQLAHHFSEPEITLIIFGVMAGVIGTILLISYGIRRLIKKSPSDVKPL | |
| | PSPDTDVPLSSVEIENPETSDQ | |
| GPA signal peptide- | MYGKIIFVLLLSEIVSISAACPWAVSGARASPGSAASPRLREGPELSPDDPAG | 855 |
| N-terminal | LLDLRQGMFAQLVAQNVLLIDGPLSWYSDPGLAGVSLTGGLSYKEDTKELV | |
| truncated 4-1BBL- | VAKAGVYYVFFQLELRRVVAGEGSGSVSLALHLQPLRSAAGAAALALTVDLP | |
| linker-GPA-T2A | PASSEARNSAFGFQGRLLHLSAGQRLGVHLHTEARARHAWQLTQGATVLG | |
| | LFRVTPEIPAGLPSPRSEGGSGGSGGGPEDEPGSGSGGGSGGGSLSTTEVA | |
| | MHTSTSSSVTKSYISSQTNDTHKRDTYAATPRAHEVSEISVRTVYPPEEETGE | |
| | RVQLAHHFSEPEITLIIFGVMAGVIGTILLISYGIRRLIKKSPSDVKPLPSPDTDV | |
| | PLSSVEIENPETSDQGSGEGRGSLLTCGDVEENPG | |
| T2A-Beta 2 | PMSRSVALAVLALLSLSGLEAYMLDLQPETGGGGSGGGGSGGGGSIQRTPK | 856 |
| microglobulin | IQVYSRHPAENGKSNFLNCYVSGFHPSDIEVDLLKNGERIEKVEHSDLSFSKD | |
| leader (B2M14- | WSFYLLYYTEFTPTEKDEYACRVNHVTLSQPKIVKWDRDMGGGGSGGGGS | |
| HPV16 E7₁₁₋₁₉ | GGGGSGGGGSGSHSMRYFFTSVSRPGRGEPRFIAVGYVDDTQFVRFDSDA | |
| peptide-linker- | ASQRMEPRAPWIEQEGPEYWDGETRKVKAHSQTHRVDLGTLRGAYNQSE | |
| beta 2 | AGSHTVQRMYGCDVGSDWRFLRGYHQYAYDGKDYIALKEDLRSWTAAD | |
| microglobulin- | MAAQTTKHKWEAAHVAEQLRAYLEGTCVEWLRRYLENGKETLQRTDAPK | |
| | THMTHHAVSDHEATLRCWALSFYPAEITLTWQRDGEDQTQDTELVETRPA | |
| linker-HLA-A*02:01 | GDGTFQKWAAVVVPSGQEQRYTCHVQHEGLPKPLTLRWEPSSQPTIPIGS | |
| Y84A-linker-GPA | GSGSGSEDGSGSGSGSLSTTEVAMHTSTSSSVTKSYISSQTNDTHKRDTYAA | |
| | TPRAHISVRTVYPPEEETGERVQLAHHFSEPEITLIIFGVMAGVIGTILLI | |
| | EVSESYGIRRLIKKSPSDVKPLPSPDTDVPLSSVEIENPETSDQ | |

Fusion polypeptide comprising beta 2 microglobulin leader (B2ML)-HPV16
E7₁₁₋₁₉ peptide-linker-beta 2 microglobulin (B2M)-linker-HLA-A*02:01
Y84A-linker-GPA-linker-full length 4-1BBL

| | | |
|---|---|---|
| Beta 2 | MSRSVALAVLALLSLSGLEAYMLDLQPETGGGGSGGGGSGGGGSIQRTPKI | 857 |
| microglobulin | QVYSRHPAENGKSNFLNCYVSGFHPSDIEVDLLKNGERIEKVEHSDLSFSKD | |
| leader (B2ML)- | WSFYLLYYTEFTPTEKDEYACRVNHVTLSQPKIVKWDRDMGGGGSGGGGS | |
| HPV16 E71149 | GGGGSGGGGSGSHSMRYFFTSVSRPGRGEPRFIAVGYVDDTQFVRFDSDA | |
| peptide-linker- | ASQRMEPRAPWIEQEGPEYWDGETRKVKAHSQTHRVDLGTLRGAYNQSE | |
| beta 2 | AGSHTVQRMYGCDVGSDWRFLRGYHQYAYDGKDYIALKEDLRSWTAAD | |
| microglobulin (B2M)- | MAAQTTKHKWEAAHVAEQLRAYLEGTCVEWLRRYLENGKETLQRTDAPK | |
| linker-HLA- | THMTHHAVSDHEATLRCWALSFYPAEITLTWQRDGEDQTQDTELVETRPA | |
| A*02:01 Y84A- | GDGTFQKWAAVVVPSGQEQRYTCHVQHEGLPKPLTLRWEPSSQPTIPIGS | |
| linker-GPA-linker- | GSGSGSEDGSGSGSGSLSTTEVAMHTSTSSSVTKSYISSQTNDTHKRDTYAA | |
| full length 4-1BBL | TPRAHEVSEISVRTVYPPEEETGERVQLAHHFSEPEITLIIFGVMAGVIGTILLI | |
| | SYGIRRLIKKSPSDVKPLPSPDTDVPLSSVEIENPETSDQSGRGGGGSGGGGS | |
| | GGGGSGGGGSSPAMEYASDASLDPEAPWPPAPRARACRVLPWALVAGLL | |
| | LLLLLAAACAVFLACPWAVSGARASPGSAASPRLREGPELSPDDPAGLLDLR | |
| | QGMFAQLVAQNVLLIDGPLSWYSDPGLAGVSLTGGLSYKE DTKELVVAKA | |
| | GVYYVFFQLELRRVVAGEGSGSVSLALHLQPLRSAAGAAALALTVDLPPASS | |
| | EARNSAFGFQGRLLHLSAGQRLGVHLHTEARARHAWQLTQGATVLGLFRV | |
| | TPEIPAGLPSPRSE | |
| linker | SGRGGGGSGGGGSGGGGSGGGGSSPA | 738 |
| Full length 4-1BBL | MEYASDASLDPEAPWPPAPRARACRVLPWALVAGLLLLLLLAAACAVFLAC | 858 |
| | PWAVSGARASPGSAASPRLREGPELSPDDPAGLLDLRQGMFAQLVAQNVL | |
| | LIDGPLSWYSDPGLAGVSLTGGLSYKEDTKELVVAKAGVYYVFFQLELRRVV | |
| | AGEGSGSVSLALHLQPLRSAAGAAALALTVDLPPASSEARNSAFGFQGRLLH | |
| | LSAGQRLGVHLHTEARARHAWQLTQGATVLGLFRVTPEIPAGLPSPRSE | |

Fusion polypeptide comprising beta 2 microglobulin leader (B2ML)-HPV16 E7₁₁₋₁₉
peptide-linker-beta 2 microglobulin (B2M)-linker-HLA-A*02:01 Y84A-linker-GPA-snorkel
linker-linker-N-terminal truncated 4-1BBL

| | | |
|---|---|---|
| Beta 2 | MSRSVALAVLALLSLSGLEAYMLDLQPETGGGGSGGGGSGGGGSIQRTPKI | 859 |
| microglobulin | QVYSRHPAENGKSNFLNCYVSGFHPSDIEVDLLKNGERIEKVEHSDLSFSKD | |
| leader (B2ML)- | WSFYLLYYTEFTPTEKDEYACRVNHVTLSQPKIVKWDRDMGGGGSGGGGS | |
| HPV16 E71149 | GGGGSGGGGSGSHSMRYFFTSVSRPGRGEPRFIAVGYVDDTQFVRFDSDA | |
| peptide-linker- | ASQRMEPRAPWIEQEGPEYWDGETRKVKAHSQTHRVDLGTLRGAYNQSE | |
| beta 2 | AGSHTVQRMYGCDVGSDWRFLRGYHQYAYDGKDYIALKEDLRSWTAAD | |
| microglobulin (B2M)- | MAAQTTKHKWEAAHVAEQLRAYLEGTCVEWLRRYLENGKETLQRTDAPK | |
| linker-HLA- | THMTHHAVSDHEATLRCWALSFYPAEITLTWQRDGEDQTQDTELVETRPA | |
| A*02:01 Y84A- | GDGTFQKWAAVVVPSGQEQRYTCHVQHEGLPKPLTLRWEPSSQPTIPIGS | |
| linker-GPA- | GSGSGSEDGSGSGSGSLSTTEVAMHTSTSSSVTKSYISSQTNDTHKRDTYAA | |
| snorkel linker- | TPRAHEVSEISVRTVYPPEEETGERVQLAHHFSEPEITLIIFGVMAGVIGTILLI | |
| linker-N-terminal | SYGIRRLIKKSPSDVKPLPSPDTDVPLSSVEIENPETSDQSGRGASSGSSGSGS | |
| truncated 4-1BBL | QKKPRYEIRWKVVVISAILALVVLTVISLIILIMLWGSGMQSPAGGSGGSGG | |
| | GGGSGGGSGGGSGGGSACPWAVSGARASPGSAASPRLREGPELSPDDPA | |
| | GLLDLRQGMFAQLVAQNVLLIDGPLSWYSDPGLAGVSLTGGLSYKEDTKEL | |
| | VVAKAGVYYVFFQLELRRVVAGEGSGSVSLALHLQPLRSAAGAAALALTVDL | |
| | PPASSEARNSAFGFQGRLLHLSAGQRLGVHLHTEARARHAWQLTQGATVL | |
| | GLFRVTPEIPAGLPSPRSE | |
| snorkel linker | SGRGASSGSSGSGSQKKPRYEIRWKVVVISAILALVVLTVISLIILIMLWGSGM | 740 |
| | QSPA | |
| linker between | GGSGGSGGGGGSGGGSGGGSGGGS | 737 |
| snorkel linker and | | |
| N-terminal | | |
| truncated 4-1BBL | | |

Fusion polypeptide comprising beta 2 microglobulin leader (B2ML)-HPV16 E7₁₁₋₁₉
peptide-linker-beta 2 microglobulin (B2M)-linker-HLA-A*02:01 Y84A-linker-GPA-linker-
SMIM1-linker-IL12p40-linker-IL12p35

| | | |
|---|---|---|
| Beta 2 | MSRSVALAVLALLSLSGLEAYMLDLQPETGGGGSGGGGSGGGGSIQRTPKI | 860 |
| microglobulin | QVYSRHPAENGKSNFLNCYVSGFHPSDIEVDLLKNGERIEKVEHSDLSFSKD | |
| leader (B2ML)- | WSFYLLYYTEFTPTEKDEYACRVNHVTLSQPKIVKWDRDMGGGGSGGGGS | |
| HPV16 E7₁₁₋₁₉ | GGGGSGGGGSGSHSMRYFFTSVSRPGRGEPRFIAVGYVDDTQFVRFDSDA | |
| peptide-linker- | ASQRMEPRAPWIEQEGPEYWDGETRKVKAHSQTHRVDLGTLRGAYNQSE | |
| beta 2 | AGSHTVQRMYGCDVGSDWRFLRGYHQYAYDGKDYIALKEDLRSWTAAD | |
| microglobulin (B2M)- | MAAQTTKHKWEAAHVAEQLRAYLEGTCVEWLRRYLENGKETLQRTDAPK | |
| linker-HLA- | THMTHHAVSDHEATLRCWALSFYPAEITLTWQRDGEDQTQDTELVETRPA | |
| A*02:01 Y84A- | GDGTFQKWAAVVVPSGQEQRYTCHVQHEGLPKPLTLRWEPSSQPTIPIGS | |
| linker-GPA-linker- | GSGSGSEDGSGSGSGSLSTTEVAMHTSTSSSVTKSYISSQTNDTHKRDTYAA | |
| SMIM1-linker- | TPRAHEVSEISVRTVYPPEEETGERVQLAHHFSEPEITLIIFGVMAGVIGTILLI | |
| IL12p40-linker- | SYGIRRLIKKSPSDVKPLPSPDTDVPLSSVEIENPETSDQGGGGSGGGGSGG | |
| IL12p35 | GGSGGGGSGGGGMQPQESHVHYSRWEDGSRDGVSLGAVSSTEEASRCR | |
| | RISQRLCTGKLGIAMKVLGGVALFWIIFILGYLTGYYVHKCKGGGGSGGGGS | |
| | GGGGSIWELKKDVYVVELDWYPDAPGEMVVLTCDTPEEDGITWTLDQSSE | |
| | VLGSGKTLTIQVKEFGDAGQYTCHKGGEVLSHSLLLLHKKEDGIWSTDILKD | |
| | QKEPKNKTFLRCEAKNYSGRFTCWWLTTISTDLTFSVKSSRGSSDPQGVTCG | |
| | AATLSAERVRGDNKEYEYSVECQEDSACPAAEESLPIEVMVDAVHKLKYENY | |
| | TSSFFIRDIIKPDPPKNLQLKPLKNSRQVEVSWEYPDTWSTPHSYFSLTFCVQ | |
| | VQGKSKREKKDRVFTDKTSATVICRKNASISVRAQDRYYSSSWSEWASVPC | |
| | SGGGGSGGGGSGGGGSRNLPVATPDPGMFPCLHHSQNLLRAVSNMLQK | |
| | ARQTLEFYPCTSEEIDHEDITKDKTSTVEACLPLELTKNESCLNSRETSFITNGS | |
| | CLASRKTSFMMALCLSSIYEDLKMYQVEFKTMNAKLLMDPKRQIFLDQNM | |
| | LAVIDELMQALNFNSETVPQKSSLEEPDFYKTKIKLCILLHAFRIRAVTIDRVM | |
| | SYLNAS | |
| linker between GPA | GGGGSGGGGSGGGGSGGGGSGGGG | 739 |
| and SMIM1 | | |
| SMIM1 | MQPQESHVHYSRWEDGSRDGVSLGAVSSTEEASRCRRISQRLCTGKLGIA | 729 |
| | MKVLGGVALFWIIFILGYLTGYYVHKCK | |
| linker between | GGGGSGGGGSGGGGS | 732 |
| SMIM1 and IL12p40 | | |
| IL12p40 (without | IWELKKDVYVVELDWYPDAPGEMVVLTCDTPEEDGITWTLDQSSEVLGSG | 861 |
| leader) | KTLTIQVKEFGDAGQYTCHKGGEVLSHSLLLLHKKEDGIWSTDILKDQKEPK | |
| | NKTFLRCEAKNYSGRFTCWWLTTISTDLTFSVKSSRGSSDPQGVTCGAATLS | |
| | AERVRGDNKEYEYSVECQEDSACPAAEESLPIEVMVDAVHKLKYENYTSSFF | |
| | IRDIIKPDPPKNLQLKPLKNSRQVEVSWEYPDTWSTPHSYFSLTFCVQVQGK | |
| | SKREKKDRVFTDKTSATVICRKNASISVRAQDRYYSSSWSEWASVPCS | |
| linker between | GGGGSGGGGSGGGGS | 732 |
| IL12p40 and | | |
| IL12p35 | | |
| IL12p35 (without | RNLPVATPDPGMFPCLHHSQNLLRAVSNMLQKARQTLEFYPCTSEEIDHED | 862 |
| leader) | ITKDKTSTVEACLPLELTKNESCLNSRETSFITNGSCLASRKTSFMMALCLSSIY | |
| | EDLKMYQVEFKTMNAKLLMDPKRQIFLDQNMLAVIDELMQALNFNSETV | |
| | PQKSSLEEPDFYKTKIKLCILLHAFRIRAVTIDRVMSYLNAS | |

Fusion polypeptide comprising beta 2 microglobulin leader (B2ML)-HPV16 E7₁₁₋₁₉
peptide-linker-beta 2 microglobulin (B2M)-linker-HLA-A*02:01 Y84A-linker-GPA-snorkel
linker-SMIM1-linker-IL12p40-linker-IL12p35

| | | |
|---|---|---|
| Beta 2 | MSRSVALAVLALLSLSGLEAYMLDLQPETGGGGSGGGGSGGGGSIQRTPKI | 863 |
| microglobulin | QVYSRHPAENGKSNFLNCYVSGFHPSDIEVDLLKNGERIEKVEHSDLSFSKD | |
| leader (B2ML)- | WSFYLLYYTEFTPTEKDEYACRVNHVTLSQPKIVKWDRDMGGGGSGGGGS | |
| HPV16 E7₁₁₋₁₉ | GGGGSGGGGSGSHSMRYFFTSVSRPGRGEPRFIAVGYVDDTQFVRFDSDA | |
| peptide-linker- | ASQRMEPRAPWIEQEGPEYWDGETRKVKAHSQTHRVDLGTLRGAYNQSE | |
| beta 2 | AGSHTVQRMYGCDVGSDWRFLRGYHQYAYDGKDYIALKEDLRSWTAAD | |
| microglobulin (B2M)- | MAAQTTKHKWEAAHVAEQLRAYLEGTCVEWLRRYLENGKETLQRTDAPK | |
| linker-HLA- | THMTHHAVSDHEATLRCWALSFYPAEITLTWQRDGEDQTQDTELVETRPA | |
| A*02:01 Y84A- | GDGTFQKWAAVVVPSGQEQRYTCHVQHEGLPKPLTLRWEPSSQPTIPIGS | |
| linker-GPA- | GSGSGSEDGSGSGSGSLSTTEVAMHTSTSSSVTKSYISSQTNDTHKRDTYAA | |
| snorkel linker- | TPRAHEVSEISVRTVYPPEEETGERVQLAHHFSEPEITLIIFGVMAGVIGTILLI | |
| SMIM1-linker- | SYGIRRLIKKSPSDVKPLPSPDTDVPLSSVEIENPETSDQSGRGASSGSSGSGS | |
| IL12p40-linker- | QKKPRYEIRWKVVVISAILALVVLTVISLIILIMLWGSGMQSPAMQPQESHV | |
| IL12p35 | HYSRWEDGSRDGVSLGAVSSTEEASRCRRISQRLCTGKLGIAMKVLGGVAL | |
| | FWIIFILGYLTGYYVHKCKGGGGSGGGGSGGGGSIWELKKDVYVVELDWYP | |
| | DAPGEMVVLTCDTPEEDGITWTLDQSSEVLGSGKTLTIQVKEFGDAGQYTC | |
| | HKGGEVLSHSLLLLHKKEDGIWSTDILKDQKEPKNKTFLRCEAKNYSGRFTC | |
| | WWLTTISTDLTFSVKSSRGSSDPQGVTCGAATLSAERVRGDNKEYEYSVEC | |
| | QEDSACPAAEESLPIEVMVDAVHKLKYENYTSSFFIRDIIKPDPPKNLQLKPLK | |
| | NSRQVEVSWEYPDTWSTPHSYFSLTFCVQVQGKSKREKKDRVFTDKTSATV | |
| | ICRKNASISVRAQDRYYSSSWSEWASVPCSGGGGSGGGGSGGGGSRNLPV | |
| | ATPDPGMFPCLHHSQNLLRAVSNMLQKARQTLEFYPCTSEEIDHEDITKDK | |
| | TSTVEACLPLELTKNESCLNSRETSFITNGSCLASRKTSFMMALCLSSIYEDLK | |
| | MYQVEFKTMNAKLLMDPKRQIFLDQNMLAVIDELMQALNFNSETVPQKS | |
| | SLEEPDFYKTKIKLCILLHAFRIRAVTIDRVMSYLNAS* | |

Fusion polypeptide comprising beta 2 microglobulin leader (B2ML)-HPV16 E7₁₁₋₁₉
peptide-linker-beta 2 microglobulin (B2M)-linker-HLA-A*02:01 Y84A-linker-GPA-
snorkel linker-linker-IL12p40-linker-IL12p35

| | | |
|---|---|---|
| Beta 2 | MSRSVALAVLALLSLSGLEAYMLDLQPETGGGGSGGGGSGGGGSIQRTPKI | 864 |
| microglobulin | QVYSRHPAENGKSNFLNCYVSGFHPSDIEVDLLKNGERIEKVEHSDLSFSKD | |
| leader (B2ML)- | WSFYLLYYTEFTPTEKDEYACRVNHVTLSQPKIVKWDRDMGGGGSGGGGS | |
| HPV16 E7₁₁₋₁₉ | GGGGSGGGGSGSHSMRYFFTSVSRPGRGEPRFIAVGYVDDTQFVRFDSDA | |
| peptide-linker- | ASQRMEPRAPWIEQEGPEYWDGETRKVKAHSQTHRVDLGTLRGAYNQSE | |
| beta 2 | AGSHTVQRMYGCDVGSDWRFLRGYHQYAYDGKDYIALKEDLRSWTAAD | |
| microglobulin (B2M)- | MAAQTTKHKWEAAHVAEQLRAYLEGTCVEWLRRYLENGKETLQRTDAPK | |
| linker-HLA- | THMTHHAVSDHEATLRCWALSFYPAEITLTWQRDGEDQTQDTELVETRPA | |
| A*02:01 Y84A- | GDGTFQKWAAVVVPSGQEQRYTCHVQHEGLPKPLTLRWEPSSQPTIPIGS | |
| linker-GPA- | GSGSGSEDGSGSGSGSLSTTEVAMHTSTSSSVTKSYISSQTNDTHKRDTYAA | |
| snorkel linker- | TPRAHEVSEISVRTVYPPEEETGERVQLAHHFSEPEITLIIFGVMAGVIGTILLI | |
| linker-IL12p40- | SYGIRRLIKKSPSDVKPLPSPDTDVPLSSVEIENPETSDQSGRGASSGSSGSGS | |
| linker-IL12p35 | QKKPRYEIRWKVVVISAILALVVLTVISLIILIMLWGSGMQSPAGGGGSGGG | |
| | GSGGGGSIWELKKDVYVVELDWYPDAPGEMVVLTCDTPEEDGITWTLDQS | |
| | SEVLGSGKTLTIQVKEFGDAGQYTCHKGGEVLSHSLLLLHKKEDGIWSTDILK | |
| | DQKEPKNKTFLRCEAKNYSGRFTCWWLTTISTDLTFSVKSSRGSSDPQGVTC | |
| | GAATLSAERVRGDNKEYEYSVECQEDSACPAAEESLPIEVMVDAVHKLKYE | |
| | NYTSSFFIRDIIKPDPPKNLQLKPLKNSRQVEVSWEYPDTWSTPHSYFSLTFC | |
| | VQVQGKSKREKKDRVFTDKTSATVICRKNASISVRAQDRYYSSSWSEWASV | |
| | PCSGGGGSGGGGSGGGGSRNLPVATPDPGMFPCLHHSQNLLRAVSNML | |
| | QKARQTLEFYPCTSEEIDHEDITKDKTSTVEACLPLELTKNESCLNSRETSFITN | |
| | GSCLASRKTSFMMALCLSSIYEDLKMYQVEFKTMNAKLLMDPKRQIFLDQN | |
| | MLAVIDELMQALNFNSETVPQKSSLEEPDFYKTKIKLCILLHAFRIRAVTIDRV | |
| | MSYLNAS* | |

Fusion polypeptide comprising beta 2 microglobulin leader (B2ML)-HPV16 E7₁₁₋₁₉ peptide-linker-
beta 2 microglobulin (B2M)-linker-HLA-A*02:01 Y84A-linker-GPA-T2A-GPA signal peptide-IL7-
linker v14-GPA

| | | |
|---|---|---|
| Beta 2 | MSRSVALAVLALLSLSGLEAYMLDLQPETGGGGSGGGGSGGGGSIQRTPKI | 865 |
| microglobulin | QVYSRHPAENGKSNFLNCYVSGFHPSDIEVDLLKNGERIEKVEHSDLSFSKD | |
| leader (B2ML)- | WSFYLLYYTEFTPTEKDEYACRVNHVTLSQPKIVKWDRDMGGGGSGGGGS | |
| HPV16 E7₁₁₋₁₉ | GGGGSGGGGSGSHSMRYFFTSVSRPGRGEPRFIAVGYVDDTQFVRFDSDA | |
| peptide-linker- | ASQRMEPRAPWIEQEGPEYWDGETRKVKAHSQTHRVDLGTLRGAYNQSE | |
| beta 2 | AGSHTVQRMYGCDVGSDWRFLRGYHQYAYDGKDYIALKEDLRSWTAAD | |
| microglobulin (B2M)- | MAAQTTKHKWEAAHVAEQLRAYLEGTCVEWLRRYLENGKETLQRTDAPK | |
| linker-HLA- | THMTHHAVSDHEATLRCWALSFYPAEITLTWQRDGEDQTQDTELVETRPA | |
| A*02:01 Y84A- | GDGTFQKWAAVVVPSGQEQRYTCHVQHEGLPKPLTLRWEPSSQPTIPIGS | |
| linker-GPA-T2A- | GSGSGSEDGSGSGSGSLSTTEVAMHTSTSSSVTKSYISSQTNDTHKRDTYAA | |
| GPA signal peptide- | TPRAHEVSEISVRTVYPPEEETGERVQLAHHFSEPEITLIIFGVMAGVIGTILLI | |
| IL7-linker v14- | SYGIRRLIKKSPSDVKPLPSPDTDVPLSSVEIENPETSDQGSGEGRGSLLTCGD | |
| GPA | VEENPGPMYGKIIFVLLLSEIVSISADCDIEGKDGKQYESVLMVSIDQLLDSM | |
| | KEIGSNCLNNEFNFFKRHICDANKEGMFLFRAARKLRQFLKMNSTGDFDLH | |
| | LLKVSEGTTILLNCTGQVKGRKPAALGEAQPTKSLEENKSLKEQKKLNDLCFL | |
| | KRLLQEIKTCWNKILMGTKEHGGSGGSGGGGGSGGGSGGGSGGGSLSTTE | |
| | VAMHTSTSSSVTKSYISSQTNDTHKRDTYAATPRAHEVSEISVRTVYPPEEET | |
| | GERVQLAHHFSEPEITLIIFGVMAGVIGTILLISYGIRRLIKKSPSDVKPLPSPDT | |
| | DVPLSSVEIENPETSDQ | |
| Beta 2 | MSRSVALAVLALLSLSGLEAYMLDLQPETGGGGSGGGGSGGGGSIQRTPKI | 849 |
| microglobulin | QVYSRHPAENGKSNFLNCYVSGFHPSDIEVDLLKNGERIEKVEHSDLSFSKD | |
| leader (B2ML)- | WSFYLLYYTEFTPTEKDEYACRVNHVTLSQPKIVKWDRDMGGGGSGGGGS | |
| HPV16 E7₁₁₋₁₉ | GGGGSGGGGSGSHSMRYFFTSVSRPGRGEPRFIAVGYVDDTQFVRFDSDA | |
| peptide-linker- | ASQRMEPRAPWIEQEGPEYWDGETRKVKAHSQTHRVDLGTLRGAYNQSE | |
| beta 2 | AGSHTVQRMYGCDVGSDWRFLRGYHQYAYDGKDYIALKEDLRSWTAAD | |
| microglobulin (B2M)- | MAAQTTKHKWEAAHVAEQLRAYLEGTCVEWLRRYLENGKETLQRTDAPK | |
| linker-HLA- | THMTHHAVSDHEATLRCWALSFYPAEITLTWQRDGEDQTQDTELVETRPA | |
| A*02:01 Y84A- | GDGTFQKWAAVVVPSGQEQRYTCHVQHEGLPKPLTLRWEPSSQPTIPIGS | |
| linker-GPA-T2A | GSGSGSEDGSGSGSGSLSTTEVAMHTSTSSSVTKSYISSQTNDTHKRDTYAA | |
| | TPRAHEVSEISVRTVYPPEEETGERVQLAHHFSEPEITLIIFGVMAGVIGTILLI | |
| | SYGIRRLIKKSPSDVKPLPSPDTDVPLSSVEIENPETSDQGSGEGRGSLLTCGD | |
| | VEENPG | |
| GPAsignal peptide- | PMYGKIIFVLLLSEIVSISADCDIEGKDGKQYESVLMVSIDQLLDSMKEIGSNC | 866 |
| IL7-linker v14- | LNNEFNFFKRHICDANKEGMFLFRAARKLRQFLKMNSTGDFDLHLLKVSEG | |
| GPA | TTILLNCTGQVKGRKPAALGEAQPTKSLEENKSLKEQKKLNDLCFLKRLLQEIK | |
| | TCWNKILMGTKEHGGSGGSGGGGGSGGGSGGGSGGGSLSTTEVAMHTS | |
| | TSSSVTKSYISSQTNDTHKRDTYAATPRAHEVSEISVRTVYPPEEETGERVQL | |
| | AHHFSEPEITLIIFGVMAGVIGTILLISYGIRRLIKKSPSDVKPLPSPDTDVPLSS | |
| | VEIENPETSDQ | |
| IL7 (without leader) | DCDIEGKDGKQYESVLMVSIDQLLDSMKEIGSNCLNNEFNFFKRHICDANKE | 867 |
| | GMFLFRAARKLRQFLKMNSTGDFDLHLLKVSEGTTILLNCTGQVKGRKPAA | |
| | LGEAQPTKSLEENKSLKEQKKLNDLCFLKRLLQEIKTCWNKILMGTKEH | |
| Linker v14 | GGSGGSGGGGGSGGGSGGGSGGGS | 737 |

Fusion polypeptide comprising beta 2 microglobulin leader (B2ML)-HPV16 E7₁₁₋₁₉ peptide-
linker-beta 2 microglobulin (B2M)-linker-HLA-A*02:01 Y84A-linker-GPA-T2A-GPA signal
peptide-IL15-linker-IL15Ra-linker v14-GPA

| | | |
|---|---|---|
| Beta 2 | MSRSVALAVLALLSLSGLEAYMLDLQPETGGGGSGGGGSGGGGSIQRTP KI | 868 |
| microglobulin | QVYSRHPAENGKSNFLNCYVSGFHPSDIEVDLLKNGERIEKVEHSDLSFSKD | |
| leader (B2ML)- | WSFYLLYYTEFTPTEKDEYACRVNHVTLSQPKIVKWDRDMGGGGSGGGGS | |
| HPV16 E7₁₁₋₁₉ | GGGGSGGGGSGSHSMRYFFTSVSRPGRGEPRFIAVGYVDDTQFVRFDSDA | |
| peptide-linker- | ASQRMEPRAPWIEQEGPEYWDGETRKVKAHSQTHRVDLGTLRGAYNQSE | |
| beta 2 | AGSHTVQRMYGCDVGSDWRFLRGYHQYAYDGKDYIALKEDLRSWTAAD | |
| microglobulin (B2M)- | MAAQTTKHKWEAAHVAEQLRAYLEGTCVEWLRRYLENGKETLQRTDAPK | |
| linker-HLA- | THMTHHAVSDHEATLRCWALSFYPAEITLTWQRDGEDQTQDTELVETRPA | |
| A*02:01 Y84A- | GDGTFQKWAAVVVPSGQEQRYTCHVQHEGLPKPLTLRWEPSSQPTIPIGS | |
| linker-GPA-T2A- | GSGSGSEDGSGSGSGSLSTTEVAMHTSTSSSVTKSYISSQTNDTHKRDTYAA | |
| GPA signal peptide- | TPRAHEVSEISVRTVYPPEEETGERVQLAHHFSEPEITLIIFGVMAGVIGTILLI | |
| IL15-linker- | SYGIRRLIKKSPSDVKPLPSPDTDVPLSSVEIENPETSDQGSGEGRGSLLTCGD | |
| IL15Ra-linker v14- | VEENPGPMYGKIIFVLLLSEIVSISANWVNVISDLKKIEDLIQSMHIDATLYTES | |
| GPA | DVHPSCKVTAMKCFLLELQVISLESGDASIHDTVENLIILANNSLSSNGNVTE | |
| | SGCKECEELEEKNIKEFLQSFVHIVQMFINTSGGGGSGGGGSGGGGSITCPP | |
| | PMSVEHADIWVKSYSLYSRERYICNSGFKRKAGTSSLTECVLNKATNVAHW | |
| | TTPSLKCIRDPALVHQRPAPPSTVTTAGVTPQPESLSPSGKEPAASSPSSNNT | |
| | AATTAAIVPGSQLMPSKSPSTGTTEISSHESSHGTPSQTTAKNWELTASASH | |
| | QPPGVYPQGHSDTTGGSGGSGGGGGSGGGSGGGSGGGSLSTTEVAMHT | |
| | STSSSVTKSYISSQTNDTHKRDTYAATPRAHEVSEISVRTVYPPEEETGERVQL | |
| | AHHFSEPEITLIIFGVMAGVIGTILLISYGIRRLIKKSPSDVKPLPSPDTDVPLSS | |
| | VEIENPETSDQ | |
| Beta 2 | MSRSVALAVLALLSLSGLEAYMLDLQPETGGGGSGGGGSGGGGSIQRTPKI | 849 |
| microglobulin | QVYSRHPAENGKSNFLNCYVSGFHPSDIEVDLLKNGERIEKVEHSDLSFSKD | |
| leader (B2ML)- | WSFYLLYYTEFTPTEKDEYACRVNHVTLSQPKIVKWDRDMGGGGSGGGGS | |
| HPV16 E7₁₁₋₁₉ | GGGGSGGGGSGSHSMRYFFTSVSRPGRGEPRFIAVGYVDDTQFVRFDSDA | |
| peptide-linker- | ASQRMEPRAPWIEQEGPEYWDGETRKVKAHSQTHRVDLGTLRGAYNQSE | |
| beta 2 | AGSHTVQRMYGCDVGSDWRFLRGYHQYAYDGKDYIALKEDLRSWTAAD | |
| microglobulin (B2M)- | MAAQTTKHKWEAAHVAEQLRAYLEGTCVEWLRRYLENGKETLQRTDAPK | |
| linker-HLA- | THMTHHAVSDHEATLRCWALSFYPAEITLTWQRDGEDQTQDTELVETRPA | |
| A*02:01 Y84A- | GDGTFQKWAAVVVPSGQEQRYTCHVQHEGLPKPLTLRWEPSSQPTIPIGS | |
| linker-GPA-T2A | GSGSGSEDGSGSGSGSLSTTEVAMHTSTSSSVTKSYISSQTNDTHKRDTYAA | |
| | TPRAHEVSEISVRTVYPPEEETGERVQLAHHFSEPEITLIIFGVMAGVIGTILLI | |
| | SYGIRRLIKKSPSDVKPLPSPDTDVPLSSVEIENPETSDQGSGEGRGSLLTCGD | |
| | VEENPG | |
| GPAsignal peptide- | PMYGKIIFVLLLSEIVSISANWVNVISDLKKIEDLIQSMHIDATLYTESDVHPSC | 869 |
| IL15-linker- | KVTAMKCFLLELQVISLESGDASIHDTVENLIILANNSLSSNGNVTESGCKECE | |
| IL15Ra-linker v14- | ELEEKNIKEFLQSFVHIVQMFINTSGGGGSGGGGSGGGGSITCPPPMSVEH | |
| GPA | ADIWVKSYSLYSRERYICNSGFKRKAGTSSLTECVLNKATNVAHWTTPSLKCI | |
| | RDPALVHQRPAPPSTVTTAGVTPQPESLSPSGKEPAASSPSSNNTAATTAA1 | |
| | VPGSQLMPSKSPSTGTTEISSHESSHGTPSQTTAKNWELTASASHQPPGVY | |
| | PQGHSDTTGGSGGSGGGGGSGGGSGGGSGGGSLSTTEVAMHTSTSSSVT | |
| | KSYISSQTNDTHKRDTYAATPRAHEVSEISVRTVYPPEEETGERVQLAHHFSE | |
| | PEITLIIFGVMAGVIGTILLISYGIRRLIKKSPSDVKPLPSPDTDVPLSSVEIENPE | |
| | TSDQ | |
| IL15 (without | NWVNVISDLKKIEDLIQSMHIDATLYTESDVHPSCKVTAMKCFLLELQVISLE | 870 |
| leader) | SGDASIHDTVENLIILANNSLSSNGNVTESGCKECEELEEKNIKEFLQSFVHIV | |
| | QMFINTS | |
| linker between IL15 | GGGGSGGGGSGGGGS | 732 |
| and IL15Ra | | |
| IL15Ra (without | ITCPPPMSVEHADIWVKSYSLYSRERYICNSGFKRKAGTSSLTECVLNKATNV | 871 |
| leader) | AHWTTPSLKCIRDPALVHQRPAPPSTVTTAGVTPQPESLSPSGKEPAASSPS | |
| | SNNTAATTAAIVPGSQLMPSKSPSTGTTEISSHESSHGTPSQTTAKNWELTA | |
| | SASHQPPGVYPQGHSDTT | |

Fusion polypeptide comprising beta 2 microglobulin leader (B2ML)-HPV16 E7₁₁₋₁₉
peptide-linker-beta 2 microglobulin (B2M)-linker-HLA-A*02:01 Y84A-linker-GPA-T2A-
SMIM1-linker-IL12p40-linker-IL12p35

| | | |
|---|---|---|
| Beta 2 | MSRSVALAVLALLSLSGLEAYMLDLQPETGGGGSGGGGSGGGGSIQRTPKI | 872 |
| microglobulin | QVYSRHPAENGKSNFLNCYVSGFHPSDIEVDLLKNGERIEKVEHSDLSFSKD | |
| leader (B2ML)- | WSFYLLYYTEFTPTEKDEYACRVNHVTLSQPKIVKWDRDMGGGGSGGGGS | |
| HPV16 E7₁₁₋₁₉ | GGGGSGGGGSGSHSMRYFFTSVSRPGRGEPRFIAVGYVDDTQFVRFDSDA | |
| peptide-linker- | ASQRMEPRAPWIEQEGPEYWDGETRKVKAHSQTHRVDLGTLRGAYNQSE | |
| beta 2 | AGSHTVQRMYGCDVGSDWRFLRGYHQYAYDGKDYIALKEDLRSWTAAD | |
| microglobulin (B2M)- | MAAQTTKHKWEAAHVAEQLRAYLEGTCVEWLRRYLENGKETLQRTDAPK | |
| linker-HLA- | THMTHHAVSDHEATLRCWALSFYPAEITLTWQRDGEDQTQDTELVETRPA | |
| A*02:01 Y84A- | GDGTFQKWAAVVVPSGQEQRYTCHVQHEGLPKPLTLRWEPSSQPTIPIGS | |
| linker-GPA-T2A- | GSGSGSEDGSGSGSGSLSTTEVAMHTSTSSSVTKSYISSQTNDTHKRDTYAA | |
| SMIM1-linker- | TPRAHEVSEISVRTVYPPEEETGERVQLAHHFSEPEITLIIFGVMAGVIGTILLI | |
| IL12p40-linker- | SYGIRRLIKKSPSDVKPLPSPDTDVPLSSVEIENPETSDQGSGEGRGSLLTCGD | |
| 1L12p35 | VEENPGPMQPQESHVHYSRWEDGSRDGVSLGAVSSTEEASRCRRISQRLC | |
| | TGKLGIAMKVLGGVALFWIIFILGYLTGYYVHKCKGGGGSGGGGSGGGGS1 | |
| | WELKKDVYVVELDWYPDAPGEMVVLTCDTPEEDGITWTLDQSSEVLGSGK | |
| | TLTIQVKEFGDAGQYTCHKGGEVLSHSLLLLHKKEDGIWSTDILKDQKEPKN | |
| | KTFLRCEAKNYSGRFTCWWLTTISTDLTFSVKSSRGSSDPQGVTCGAATLSA | |
| | ERVRGDNKEYEYSVECQEDSACPAAEESLPIEVMVDAVHKLKYENYTSSFFIR | |
| | DIIKPDPPKNLQLKPLKNSRQVEVSWEYPDTWSTPHSYFSLTFCVQVQGKSK | |
| | REKKDRVFTDKTSATVICRKNASISVRAQDRYYSSSWSEWASVPCSGGGGS | |
| | GGGGSGGGGSRNLPVATPDPGMFPCLHHSQNLLRAVSNMLQKARQTLEF | |
| | YPCTSEEIDHEDITKDKTSTVEACLPLELTKNESCLNSRETSFITNGSCLASRKT | |
| | SFMMALCLSSIYEDLKMYQVEFKTMNAKLLMDPKRQIFLDQNMLAVIDEL | |
| | MQALNFNSETVPQKSSLEEPDFYKTKIKLCILLHAFRIRAVTIDRVMSYLNAS | |
| Beta 2 | MSRSVALAVLALLSLSGLEAYMLDLQPETGGGGSGGGGSGGGGSIQRTPKI | 849 |
| microglobulin | QVYSRHPAENGKSNFLNCYVSGFHPSDIEVDLLKNGERIEKVEHSDLSFSKD | |
| leader (B2ML)- | WSFYLLYYTEFTPTEKDEYACRVNHVTLSQPKIVKWDRDMGGGGSGGGGS | |
| HPV16 E7₁₁₋₁₉ | GGGGSGGGGSGSHSMRYFFTSVSRPGRGEPRFIAVGYVDDTQFVRFDSDA | |
| peptide-linker- | ASQRMEPRAPWIEQEGPEYWDGETRKVKAHSQTHRVDLGTLRGAYNQSE | |
| beta 2 | AGSHTVQRMYGCDVGSDWRFLRGYHQYAYDGKDYIALKEDLRSWTAAD | |
| microglobulin (B2M)- | MAAQTTKHKWEAAHVAEQLRAYLEGTCVEWLRRYLENGKETLQRTDAPK | |
| linker-HLA- | THMTHHAVSDHEATLRCWALSFYPAEITLTWQRDGEDQTQDTELVETRPA | |
| A*02:01 Y84A- | GDGTFQKWAAVVVPSGQEQRYTCHVQHEGLPKPLTLRWEPSSQPTIPIGS | |
| linker-GPA-T2A | GSGSGSEDGSGSGSGSLSTTEVAMHTSTSSSVTKSYISSQTNDTHKRDTYAA | |
| | TPRAHEVSEISVRTVYPPEEETGERVQLAHHFSEPEITLIIFGVMAGVIGTILLI | |
| | SYGIRRLIKKSPSDVKPLPSPDTDVPLSSVEIENPETSDQGSGEGRGSLLTCGD | |
| | VEENPG | |
| SMIM1-linker- | PMQPQESHVHYSRWEDGSRDGVSLGAVSSTEEASRCRRISQRLCTGKLGIA | 873 |
| IL12p40-linker- | MKVLGGVALFWIIFILGYLTGYYVHKCKGGGGSGGGGSGGGGSIWELKKD | |
| 1L12p35 | VYVVELDWYPDAPGEMVVLTCDTPEEDGITWTLDQSSEVLGSGKTLTIQVK | |
| | EFGDAGQYTCHKGGEVLSHSLLLLHKKEDGIWSTDILKDQKEPKNKTFLRCE | |
| | AKNYSGRFTCWWLTTISTDLTFSVKSSRGSSDPQGVTCGAATLSAERVRGD | |
| | NKEYEYSVECQEDSACPAAEESLPIEVMVDAVHKLKYENYTSSFFIRDIIKPDP | |
| | PKNLQLKPLKNSRQVEVSWEYPDTWSTPHSYFSLTFCVQVQGKSKREKKDR | |
| | VFTDKTSATVICRKNASISVRAQDRYYSSSWSEWASVPCSGGGGSGGGGS | |
| | GGGGSRNLPVATPDPGMFPCLHHSQNLLRAVSNMLQKARQTLEFYPCTSE | |
| | EIDHEDITKDKTSTVEACLPLELTKNESCLNSRETSFITNGSCLASRKTSFMMA | |
| | LCLSSIYEDLKMYQVEFKTMNAKLLMDPKRQIFLDQNMLAVIDELMQALNF | |
| | NSETVPQKSSLEEPDFYKTKIKLCILLHAFRIRAVTIDRVMSYLNAS | |

[0466] In another aspect, the disclosure provides any one of the polypeptide sequences corresponding to a fusion protein listed in Table 9. In one embodiment, the fusion polypeptide comprises Beta 2 microglobulin leader sequence (B2ML)-HPV16 E7₁₁₋₁₉ peptide-Beta 2 microglobulin (B2M)-HLA-A*02:01, set forth in SEQ ID NO: 843. In one embodiment, the fusion polypeptide comprises B2ML-HPV16 E7₁₁₋₁₉ peptide-B2M-HLA-A*02:01 Y84A, set forth in SEQ ID NO: 844. In one embodiments, the fusion polypeptide comprises B2ML-HPV16 E711-19 peptide-B2M-HLA-A*02:01 Y84C, set forth in SEQ ID NO: 845. In one embodiment, the fusion polypeptide comprises B2ML-HPV16 E711-19 peptide-B2M-HLA-A*02:01-Glycophorin A (GPA), set forth in SEQ ID NO: 726. In one embodiment, the fusion polypeptide comprises B2ML-HPV16 E711-19 peptide-B2M-HLA-A*02:01 Y84A-GPA, set forth in SEQ ID NO: 846. In one embodiment, the fusion polypeptide comprises B2ML-HPV16 E7₁₁₋₁₉ peptide-B2M-HLA-A*02:01 Y84C-GPA, set forth in SEQ ID NO: 847. In one embodiment, the fusion polypeptide comprises Beta 2 microglobulin leader (B2ML)-HPV16 E7₁₁₋₁₉ peptide-linker-Beta 2 microglobulin (B2M)-linker-HLA-A*02:01 Y84A-linker-GPA-T2A-GPA signal peptide-N-terminal truncated 4-1BBL-linker v17-GPA, set forth in SEQ ID NO: 848. In one embodiment, the fusion polypeptide comprises Beta 2 Microglobulin leader (B2ML)-HPV16 E7₁₁₋₁₉ peptide-linker-Beta 2 microglobulin (B2M)-linker-HLA-A*02:01 Y84A-linker-GPA-T2A, set forth in SEQ ID NO:849. In one embodiment, the fusion polypeptide comprises SMIM1-linker-IL12p40-linker-IL12p35, set forth in SEQ ID NO: 873. In one embodiment, the fusion polypeptide comprises GPA signal peptide-4-1BBL-linker v17-GPA, set forth in SEQ ID NO: 850. In one embodiment, the fusion polypeptide comprises GPA signal peptide-N-terminal truncated 4-1BBL-linker-GPA-T2A-Beta 2 microglobulin leader (B2ML)-HPV16 E7₁₁₋₁₉ peptide-linker-beta 2 microglobulin-linker-HLA-A*02:01 Y84A-linker-GPA, set forth in SEQ ID NO: 854. In one embodiment, the fusion polypeptide comprises GPA signal peptide-N-terminal truncated 4-1BBL-linker-GPA-T2A, set forth in SEQ ID NO: 855. In one embodiment, the fusion polypeptide comprises T2A-Beta 2 microglobulin leader (B2ML)-HPV16 E7₁₁₋₁₉ peptide-linker-beta 2 microglobulin-linker-HLA-A*02:01 Y84A-linker-GPA, set forth in SEQ ID NO: 856. In one embodiment, the fusion polypeptide comprises Beta 2 microglobulin leader (B2ML)-HPV16 E7₁₁₋₁₉ peptide-linker-beta 2 microglobulin (B2M)-linker-HLA-A*02:01 Y84A-linker-GPA-linker-full length 4-1BBL, set forth in SEQ ID NO: 857. In one embodiment, the fusion polypeptide comprises Beta 2 microglobulin leader (B2ML)-HPV16 E7₁₁₋₁₉ peptide-linker-beta 2 microglobulin (B2M)-linker-HLA-A*02:01 Y84A-linker-GPA-snorkel linker-linker-N-terminal truncated 4-1BBL, set forth in SEQ ID NO: 859. In one embodiment, the fusion polypeptide comprises Beta 2 microglobulin leader (B2ML)-HPV16 E7₁₁₋₁₉ peptide-linker-beta 2 microglobulin (B2M)-linker-HLA-A*02:01 Y84A-linker-GPA-linker-SMIM1-linker-IL12p40-linker-IL12p35, set forth in SEQ ID NO: 860. In one embodiment, the fusion polypeptide comprises Beta 2 microglobulin leader (B2ML)-HPV16 E7₁₁₋₁₉ peptide-linker-beta 2 microglobulin (B2M)-linker-HLA-A*02:01 Y84A-linker-GPA-snorkel linker-SMIM1-linker-IL12p40-linker-IL12p35, set forth in SEQ ID NO: 863. In one embodiment, the fusion polypeptide comprises Beta 2 microglobulin leader (B2ML)-HPV16 E7₁₁₋₁₉ peptide-linker-beta 2 microglobulin (B2M)-linker-HLA-A*02:01 Y84A-linker-GPA-snorkel linker-linker-IL12p40-linker-IL12p35, set forth in SEQ ID NO: 864. In one embodiment, the fusion polypeptide comprises Beta 2 microglobulin leader (B2ML)-HPV16 E7₁₁₋₁₉ peptide-linker-beta 2 microglobulin (B2M)-linker-HLA-A*02:01 Y84A-linker-GPA-T2A-GPA signal peptide-IL7-linker v14-GPA, set forth in SEQ ID NO: 865. In one embodiment, the fusion polypeptide comprises Beta 2 microglobulin leader (B2ML)-HPV16 E7₁₁₋₁₉ peptide-linker-beta 2 microglobulin (B2M)-linker-HLA-A*02:01 Y84A-linker-GPA-T2A, set forth in SEQ ID NO: 849. In one embodiment, the fusion polypeptide comprises GPA signal peptide-IL7-linker v14-GPA, set forth in SEQ ID NO: 866. In one embodiment, the fusion polypeptide comprises Beta 2 microglobulin leader (B2ML)-HPV16 E7₁₁₋₁₉ peptide-linker-beta 2 microglobulin (B2M)-linker-HLA-A*02:01 Y84A-linker-GPA-T2A-GPA signal peptide-IL15-linker-IL15Rα-linker v14-GPA, set forth in SEQ ID NO: 868. In one embodiment, the fusion polypeptide comprises GPA signal peptide-IL15-linker-IL15Rα-linker v14-GPA, set forth in SEQ ID NO: 869. In one embodiment, the fusion polypeptide comprises Beta 2 microglobulin leader (B2ML)-HPV16 E7₁₁₋₁₉ peptide-linker-beta 2 microglobulin (B2M)-linker-HLA-A*02:01 Y84A-linker-GPA-T2A-SMIM1-linker-IL12p40-linker-IL12p35, set forth in SEQ ID NO: 872.

[0467] In some embodiments, the disclosure provides a nucleic acid encoding a fusion polypeptide comprising an amino acid sequence set forth in Table 9. In some embodiments, the nucleic acid encodes a fusion polypeptide, wherein the fusion polypeptide has at least 80%, 85%, 90%, 95%, 96%, 97%, 98%, or 99% identity to an amino acid sequence set forth in Table 9. In some embodiments, the nucleic acid encodes a fusion polypeptide, wherein the fusion polypeptide has at least 80%, 85%, 90%, 95%, 96%, 97%, 98%, or 99% identity to SEQ ID NO: 843. In some embodiments, the nucleic acid encodes a fusion polypeptide, wherein the fusion polypeptide has at least 80%, 85%, 90%, 95%, 96%, 97%, 98%, or 99% identity to SEQ ID NO: 844. In some embodiments, the nucleic acid encodes a fusion polypeptide, wherein the fusion polypeptide has at least 80%, 85%, 90%, 95%, 96%, 97%, 98%, or 99% identity to SEQ ID NO: 845. In some embodiments, the nucleic acid encodes a fusion polypeptide, wherein the fusion polypeptide has at least 80%, 85%, 90%, 95%, 96%, 97%, 98%, or 99% identity to SEQ ID NO: 726. In some embodiments, the nucleic acid encodes a fusion polypeptide, wherein the fusion polypeptide has at least 80%, 85%, 90%, 95%, 96%, 97%, 98%, or 99% identity to SEQ ID NO: 846. In some embodiments, the nucleic acid encodes a fusion polypeptide, wherein the fusion polypeptide has at least 80%, 85%, 90%, 95%, 96%, 97%, 98%, or 99% identity to SEQ ID NO: 847. In some embodiments, the nucleic acid encodes a fusion polypeptide, wherein the fusion polypeptide has at least 80%, 85%, 90%, 95%, 96%, 97%, 98%, or 99% identity to SEQ ID NO: 848. In some embodiments, the nucleic acid encodes a fusion polypeptide, wherein the fusion polypeptide has at least 80%, 85%, 90%, 95%, 96%, 97%, 98%, or 99% identity to SEQ ID NO:849. In some embodiments, the nucleic acid encodes a fusion polypeptide, wherein the fusion polypeptide has at least 80%, 85%, 90%, 95%, 96%, 97%, 98%, or 99% identity to SEQ ID NO: 850. In some embodiments, the nucleic acid encodes a fusion polypeptide, wherein the fusion polypeptide has at least 80%, 85%, 90%, 95%, 96%, 97%, 98%, or 99% identity to SEQ ID NO: 854. In some embodiments, the nucleic acid encodes a fusion polypeptide, wherein the fusion polypeptide has at least 80%, 85%, 90%, 95%, 96%, 97%, 98%, or 99% identity to SEQ ID NO: 855. In some embodiments, the nucleic acid encodes a fusion polypeptide, wherein the fusion polypeptide has at least 80%, 85%, 90%, 95%, 96%, 97%, 98%, or 99% identity to SEQ ID NO: 856. In some embodiments, the nucleic acid encodes a fusion polypeptide, wherein the fusion polypeptide has at least 80%, 85%, 90%, 95%, 96%, 97%, 98%, or 99% identity to SEQ ID NO: 857. In some embodiments, the nucleic acid encodes a fusion polypeptide, wherein the fusion polypeptide has at least 80%, 85%, 90%, 95%, 96%, 97%, 98%, or 99% identity to SEQ ID NO: 859. In some embodiments, the nucleic acid encodes a fusion polypeptide, wherein the fusion polypeptide has at least 80%, 85%, 90%, 95%, 96%, 97%, 98%, or 99% identity to SEQ ID NO: 860. In some embodiments, the nucleic acid encodes a fusion polypeptide, wherein the fusion polypeptide has at least 80%, 85%, 90%, 95%, 96%, 97%, 98%, or 99% identity to SEQ ID NO: 863. In some embodiments, the nucleic acid encodes a fusion polypeptide, wherein the fusion polypeptide has at least 80%, 85%, 90%, 95%, 96%, 97%, 98%, or 99% identity to SEQ ID NO: 864. In some embodiments, the nucleic acid encodes a fusion polypeptide, wherein the fusion polypeptide has at least 80%, 85%, 90%, 95%, 96%, 97%, 98%, or 99% identity to SEQ ID NO: 865. In some embodiments, the nucleic acid encodes a fusion polypeptide, wherein the fusion polypeptide has at least 80%, 85%, 90%, 95%, 96%, 97%, 98%, or 99% identity to SEQ ID NO: 849. In some embodiments, the nucleic acid encodes a fusion polypeptide, wherein the fusion polypeptide has at least 80%, 85%, 90%, 95%, 96%, 97%, 98%, or 99% identity to SEQ ID NO: 866. In some embodiments, the nucleic acid encodes a fusion polypeptide, wherein the fusion polypeptide has at least 80%, 85%, 90%, 95%, 96%, 97%, 98%, or 99% identity to SEQ ID NO: 868. In some embodiments, the nucleic acid encodes a fusion polypeptide, wherein the fusion polypeptide has at least 80%, 85%, 90%, 95%, 96%, 97%, 98%, or 99% identity to SEQ ID NO: 869. In some embodiments, the nucleic acid encodes a fusion polypeptide, wherein the fusion polypeptide has at least 80%, 85%, 90%, 95%, 96%, 97%, 98%, or 99% identity to SEQ ID NO: 872.

[0468] In some embodiments, the polypeptide comprising 4-1BBL is an N-terminal truncated 4-1BBL (SEQ ID NO: 851). In some embodiments, the polypeptide comprising 4-1BBL is full length 4-1BBL.

[0469] Also provided by the present disclosure is an aAPC comprising a first exogenous polypeptide and a second exogenous polypeptide, wherein the first exogenous polypeptide comprises a fusion protein comprising an exogenous antigenic peptide, an exogenous antigen presenting polypeptide and a membrane anchor polypeptide, wherein the second exogenous polypeptide comprises one or more polypeptides selected from the group consisting of: an exogenous co-stimulatory polypeptide, an exogenous co-inhibitory polypeptide, an exogenous Treg expansion polypeptide, and an exogenous cytokine polypeptide, and wherein the aAPC is produced by a process comprising introducing an exogenous nucleic acid encoding the first exogenous polypeptide into a nucleated cell (e.g., nucleated erythroid precursor cell); introducing an exogenous nucleic acid encoding the second exogenous polypeptide into the nucleated cell (e.g., nucleated erythroid precursor cell); and culturing the nucleated cell (e.g., nucleated erythroid precursor cell) under conditions suitable for enucleation and for production of both the first exogenous polypeptide and the second exogenous polypeptide. In some embodiments, the exogenous antigenic polypeptide is selected from an antigenic polypeptide disclosed in Table 1 or Tables 14-24. In some embodiments, the first exogenous polypeptide comprises a fusion protein comprising an exogenous antigenic peptide fused to an exogenous antigen presenting polypeptide fused to a membrane anchor polypeptide. In some embodiments, the exogenous antigenic polypeptide is selected from the group consisting of: melanoma antigen genes-A (MAGE-A) antigens, neutrophil granule protease antigens, NY-ESO-1/LAGE-2 antigens, telomerase antigens, myelin oligodendrocyte glycoprotein (MOG) antigens, glycoprotein 100 (gp100) antigens, epstein barr virus (EBV) antigens, human papilloma virus (HPV) antigens, and hepatitis B virus (HBV) antigens. In some embodiments, the exogenous antigenic polypeptide further comprises a leader sequence. In some embodiments, the leader sequence is a beta 2 microglobulin (B2M) leader sequence or a GPA signal peptide. In some embodiments, the membrane anchor is glycophorin A (GPA), or a fragment thereof, or small integral membrane protein 1 (SMIM1) In some embodiments, the exogenous antigen-presenting polypeptide is an MHC class I polypeptide, an MHC class I single chain fusion, an MHC class II polypeptide, or an MHC class II single chain fusion. In some embodiments, the MHC class I polypeptide is selected from the group consisting of: HLA-A, HLA-B, and HLA-C. In some embodiments, the MHC class II polypeptide is selected from the group consisting of: HLA-DPα, HLA-DPβ, HLA-DM, HLA-DOA, HLA-DOB, HLA-DQα, HLA-DQβ, HLA-DRα, and HLA-DRβ. In some embodiments, the MHC class I single chain fusion comprises an an α-chain, and a β2m chain, and optionally an anchor polypeptide. In some embodiments, the exogenous antigenic polypeptide is connected to the MHC I single chain fusion via a linker. In some embodiments, the linker is a cleavable linker. In some embodiments, the MHC class II single chain fusion comprises an anchor, an α-chain, and optionally a β chain. In some embodiments, the exogenous antigenic polypeptide is connected to the MHC II single chain fusion via a linker. In some embodiments, the linker is a cleavable linker. In some embodiments, the exogenous cytokine polypeptide is selected from the group consisting of: IL2, IL15, IL-15Rα fused to IL-15, IL7, IL12, IL18, IL21, IL4, IL6, IL23, IL27, IL17, IL10, TGF-beta, IFN-gamma, IL-1 beta, GM-CSF, and IL-25. In some embodiments, the exogenous costimulatory polypeptide is selected from the group consisting of 4-1BBL, LIGHT, anti CD28, CD80, CD86, CD70, OX40L, GITRL, TIM4, SLAM, CD48, CD58, CD83, CD155, CD112, IL-15Rα fused to IL-15, IL-21, ICAM-1, a ligand for LFA-1, anti CD3, and a combination thereof. In some embodiments, the exogenous co-inhibitory polypeptide is selected from the group consisting of: IL-35, IL-10, VSIG-3 and a LAG3 agonist. In some embodiments, the exogenous Treg expansion polypeptide is selected from the group consisting of: CD25-specific IL-2, TNFR2-specific TNFα, antiDR3 agonist (VEGI/TL1A specific), 4-1BBL, TGFβ, and a combination thereof. In some embodiments, the aAPC further comprises an exogenous polypeptide comprising an adhesion molecule. In some embodiments, the adhesion molecule is selected from the group consisting of: ICAM4/LW, CD36, CD58/LFA3, CD47, VLA4, BCAM/Lu, CD44, CD99/MIC2, ICAM1, and CD147. In some embodiments, the aAPC of claim 90, wherein the exogenous nucleic acid comprises DNA or RNA. In some embodiments, the introducing step comprises viral transduction or electroporation. In some embodiments, the introducing step comprises utilizing one or more of: liposome mediated transfer, adenovirus, adeno-associated virus, herpes virus, a retroviral based vector, lipofection, and a lentiviral vector. In some embodiments, the introducing step comprises introducing the first exogenous nucleic acid encoding the first exogenous polypeptide and the second exogenous nucleic acid encoding the second exogenous polypeptide by transduction with a lentiviral vector, wherein the first exogenous nucleic acid and the second exogenous nucleic acid are contained in the same lentiviral vector. In some embodiments, the introducing step comprises introducing the first exogenous nucleic acid encoding the first exogenous polypeptide by transduction with a first lentiviral vector, and introducing the second exogenous nucleic acid encoding the second exogenous polypeptide by transduction with a second lentiviral vector. In some embodiments, the first and/or second exogenous nucleic acid comprises a promoter selected from the group consisting of: beta-globin promoter, murine stem cell virus (MSCV) promoter, Gibbon ape leukemia virus (GALV) promoter, human elongation factor 1 alpha (EF1alpha) promoter, CAG CMV immediate early enhancer and the chicken beta-actin (CAG) promoter, and human phosphoglycerate kinase 1 (PGK) promoter.

### Immunological Synapse

[0470] As described herein, the engineered erythroid cells (i.e. the aAPCs) of the present disclosure provide numerous advantages over the use of spherical nanoparticles, such as rigid, bead-based aAPCs. Molecular mobility (e.g. movement of ligands in the cell membrane) and molecular clustering are important features of immunological synapse formation. The membrane of an aAPC described herein is much more dynamic and fluid than the outer surface of a nanoparticle, and thus allows a much more efficient molecular reorganization and MHC clustering during the formation of an immunological synapse, or in mediating trogocytosis. Further, in contrast to the small size of the nanoparticles, the aAPC's of the invention offer a greater surface area for the formation of functional micron-scaled clusters in an immunological synapse. In some embodiments, the aAPCs as described herein are engineered to form an immunological synapse, wherein the immunological synapse facilitates T cell activation.

[0471] An immunological synapse (or immune synapse, or IS) is the interface between an antigen-presenting cell and a lymphocyte such as a T/B cell or an NK cell. An immunological synapse can consist of molecules involved in T cell activation, which compose typical patterns, called activation clusters. According to the most well studied model, the immune synapse is also known as the supramolecular activation cluster (SMAC) (Monks et al., Nature 1998, 395 (6697): 82-86; incorporated in their entirety herein by reference), which is composed of concentric rings (central, peripheral or distal regions) each containing segregated clusters of proteins. Molecules in the immunological synapse include antigen presenting molecules (e.g. an MHC Class I or MHC Class II molecule), adhesion molecules, co-stimulatory molecules, and co-inhibitory molecules.

[0472] The immunological synapse is a dynamic structure formed after T cell receptors cluster together in microclusters that eventually move towards the immunological synapse center. The spatial and temporal changes of these molecules at the interface of T lymphocyte and APC regulate the structure of the immune synapse and T lymphocyte immune response. In general, efficient CD4+ and CD8+ T cell activation is associated with the formation of a functional immunological synapse (Y. Kaizuka, et al. Proc. Natl. Acad. Sci. U.S.A., 104 (2007), pp. 20296-20301, incorporated by reference in its entirety herein).

[0473] In some embodiments, the disclosure features an aAPC that can form an immunological synapse between the aAPC and an immune cell such as a T cell, B cell or an NK cell. In some embodiments, the aAPC of the invention has the ability to assemble more than one MHC molecule in the immunological synapse.

[0474] The initial interaction at the immunological synapse occurs between the lymphocyte function-associated antigen-1 (LFA-1) present in the peripheral-SMAC of a T-cell, and integrin adhesion molecules (such as ICAM-1 or ICAM-2) on an APC. When bound to an APC, the T-cell can then extend pseudopodia and scan the surface of target cell to find a specific peptide-MHC complex. The process of formation begins when the T-cell receptor (TCR) binds to the peptide-MHC complex on the antigen-presenting cell and initiates signaling activation through formation of microclusters/lipid rafts (Varma et al., Immunity. 2006 July; 25(1):117-27; incorporated in their entirety herein by reference).

[0475] It is a surprising discovery of the present disclosure that the engineered erythroid cells or enucleated cells (i.e. the aAPCs) of the invention are capable of initiating and forming an active immunological synapse despite the absence of endogenous ICAM1 on their surface. Without wishing to be bound by any particular theory, it is believed that other integrins such as JAM1 and/or ICAM-4, which are naturally present on the surface of erythroid cells, are capable of replacing the role of ICAM-1 in the formation of a functional immunological synapse.

[0476] Accordingly, in some embodiments, the aAPCs of the present disclosure comprise one or more exogenous cell adhesion polypeptides to mediate or facilitate the formation of the immunological synapse. In some embodiments, the one or more cell adhesion molecule is selected from the group consisting of ICAM4/LW, CD36, CD58/LFA3, CD47, VLA4, BCAM/Lu, CD44, CD99/MIC2, ICAM1, JAM1 and CD147, or any combination thereof.

[0477] It is an advantage of the present invention that the engineered erythroid cells (i.e. the aAPCs) described herein have a fluid cell membrane that provides dynamic molecular movement and thus allows efficient molecular reorganization and MHC clustering, which is required for T cell stimulation. Signaling is initiated and sustained in TCR microclusters that are formed continuously in the periphery of the immunological synapse and transported to the center to form the central SMAC. During the formation of the central SMAC the microclusters can move independently of each other, and can fuse to form larger clusters with continuous movements. A threshold MHCI cluster density is required to sustain active immune signaling (Anikeeva et al., PLoS One. 2012; 7(8):e41466; Bullock et al., J Immunol. 2000 Mar. 1; 164(5):2354-61; Bullock et al., J Immunol. 2003 Feb. 15; 170(4):1822-9; Jiang et al., Immunity. 2011 Jan. 28; 34(1):13-23; each of which is incorporated in its entirety herein by reference). Accordingly, in some embodiments, an aAPC provided herein can mediate the clustering of MHC molecules at a density that is effective to form a functional immunological synapse and to activate immune signaling.

[0478] Another consequence of the molecular reorganization in immune synapse formation is the intercellular transfer of APC membrane proteins to the T cell. T cells acquire MHC class I and class II glycoproteins from APCs, together with co-stimulatory molecules and membrane patches, by a mechanism referred to as trogocytosis. As described herein, the membrane of an aAPC provided herein allows efficient molecular reorganization and MHC clustering due to its fluidity. In some embodiments, an aAPC of the invention allows or mediates the molecular reorganization in immune synapse formation such that trogocytosis occurs.

[0479] The sizes of the immunological synapse can be determined by numerous methods known in the art, including microscopy, such as total internal reflection fluorescence microscopy (TIRFM) (Varma et al., 2006). Studies have shown that the immunological synapse is composed of micron-scale SMACs (Varma et al., 2006; Dustin et al., Science. 2002, 298(5594):785-9; incorporated in their entirety herein by reference). In some embodiments, an aAPC of the invention can form an immunological synapse of an average diameter between about 0.5 μm and 5.0 μm. In some embodiments, an aAPC of the invention can form an immunological synapse of an average diameter of at least about 0.5 μm. In some embodiments, an aAPC of the invention can form a functional immunological synapse of an average diameter between about 0.5 μm and 4.5 μm, between about 0.5 μm and 4.0 μm, between about 0.5 μm and 3.5 μm, between about 0.5 μm and 3.0 μm, between about 0.5 μm and 2.5 μm, between about 0.5 μm and 2.0 μm, between about 0.5 μm and 1.5 μm, between about 0.5 μm and 1.0 μm, between about 1.0 μm and 5.0 μm, between about 1.0 μm and 4.5 μm, between about 1.0 μm and 4.0 μm, between about 1.0 μm and 3.5 μm, between about 1.0 μm and 3.0 μm, between about 1.0 μm and 2.5 μm, between about 1.0 μm and 2.0 μm, between about 1.0 μm and 1.5 μm, between about 1.5 μm and 5.0 μm, between about 1.5 μm and 4.5 μm, between about 1.5 μm and 4.0 μm, between about 1.5 μm and 3.5 μm, between about 1.5 μm and 3.0 μm, between about 1.5 μm and 2.5 μm, between about 1.5 μm and 2.0 μm, between about 2.0 μm and 5.0 μm, between about 2.0 μm and 4.5 μm, between about 2.0 μm and 4.0 μm, between about 2.0 μm and 3.5 μm, between about 2.0 μm and 3.0 μm, between about 2.0 μm and 2.5 μm, between about 2.0 μm and 5.0 μm, between about 2.5 μm and 4.5 μm, between about 2.5 μm and 4.0 μm, between about 2.5 μm and 3.5 μm, between about 2.5 μm and 3.0 μm, between about 3.0 μm and 5.0 μm, between about 3.0 μm and 4.5 μm, between about 3.0 μm and 4.0 μm, between about 3.0 μm and 3.5 μm, between about 3.5 μm and 5.0 μm, between about 3.5 μm and 4.5 μm, between about 3.5 μm and 4.0 μm, between about 4.0 μm and 5.0 μm, between about 4.0 μm and 4.5 μm, between about 4.5 μm and 5.0 μm. In some embodiments, the aAPC of the invention can form a functional immunological synapse of an average diameter of at least 0.5 μm, 0.6 μm, 0.7 μm, 0.8 μm, 0.9 μm, 1.0 μm, 1.5 μm, 2.0 μm, 2.5 μm, 3 μm, 3.5 μm, 4.0 μm or 5 μm.

[0480] As described herein, an advantage of the aAPCs of the present disclosure is the fluidity of the aAPC cell membrane that allows efficient molecular reorganization. Specific signaling pathways lead to polarization of the T-cell by orienting its centrosome toward the site of the immunological synapse. The accumulation and polarization of actin is triggered by TCR/CD3 interactions with integrins and small GTPases. These interactions promote actin polymerization, and as actin is accumulated and reorganized, it promotes clustering of the TCRs and integrins. These highly dynamic contacts are characterized by continuous cytoskeletal remodeling events, which not only structure the interface but also exert a considerable amount of mechanical forces, which influence information transfer both into and out of the immune cell (Basu et al., Trends Cell Biol. 2017 April; 27(4): 241-254; Hivroz et al., Front Immunol. 2016; 7: 46; incorporated in their entirety herein by reference). The adhesive forces of tensile strengths between the TCRs and integrins at the site of immunological synapse can be determined by, e.g., atomic force microscopy, biomembrane force probe (BFP) technique, traction force microscopy etc. (Hivroz et al., Front Immunol. 2016; 7: 46; incorporated in its entirety herein by reference).

[0481] In some embodiments, tensile strength is a measure of the adhesive forces between the T cell receptor and the molecules of the immunological synapse, e.g., peptide-MHC complex, formed by the aAPC. In some embodiments, an aAPC is capable of forming an immunological synapse with a tensile strength sufficient to activate an immune cell. In some embodiments, an aAPC of the present disclosure can form a synapse with a tensile strength of between about 1 pN and 30,000 pN. In some embodiments, an aAPC of the present disclosure can form a synapse with a tensile strength of between about 1 pN and 20,000 pN, between about 1 pN and 10,000 pN, between about 1 pN and 9,000 pN, between about 1 pN and 8,000 pN, between about 1 pN and 7,000 pN, between about 1 pN and 6,000 pN, between about 1 pN and 5,000 pN, between about 1 pN and 4,000 pN, between about 1 pN and 3,000 pN, between about 1 pN and 2,000 pN, between about 1 pN and 1,000 pN, between about 1,000 pN and 30,000 pN, between about 1,000 pN and 20,000 pN, between about 1,000 pN and 10,000 pN, between about 1,000 pN and 9,000 pN, between about 1,000 pN and 8,000 pN, between about 1,000 pN and 7,000 pN, between about 1,000 pN and 6,000 pN, between about 1,000 pN and 5,000 pN, between about 1,000 pN and 4,000 pN, between about 1,000 pN and 3,000 pN, between about 1,000 pN and 2,000 pN. In some embodiments, the optimum mechanical force between the peptide-MHC complex and the TCR at the immunological synapse is at least 1 pN, 1.5 pN, 2.0 pN, 3.0 pN, 4.0 pN, 5.0 pN, 6.0 pN, 7.0 pN, 8.0 pN, 9.0 pN, 10 pN, 20 pN, 30 pN, 40 pN, 50 pN, 60 pN, 70 pN, 80 pN, 90 pN, 100 pN, 500 pN, 1,000 pN, 2,000 pN, 3,000 pN, 4,000 pN, 5,000 pN, 6,000 pN, 7,000 pN, 8,000 pN, 9,000 pN, 10,000 pN, 11,000 pN, 12,000 pN, 13,000 pN, 14,000 pN, 15,000 pN, or 20,000 pN. In some embodiments, an aAPC as described herein can trigger mechanical forces between the peptide-MHC complex and the TCR at the immunological synapse, to activate an immune cell.

### Treg Costimulatory and Coinhibitory Polypeptides

[0482] Regulatory T cells (“Treg”) are a specialized subpopulation of T cells which suppresses activation of the immune system and thereby maintains tolerance to self-antigens. Treg cells constitute 5-10% of CD4⁺ T cells in humans and rodents. Treg cells constitute 5-10% of CD4⁺ T cells in humans and rodents, and constitutively express CD4 and CD25, as well as the transcription factor FoxP3 (CD4+CD25+FoxP3+), which is involved in their development and function. IL-2 also appears to play an important role in Treg cell development and homeostasis because animals deficient for IL-2 or components of its receptor develop T cell hyperproliferation and autoimmune diseases that can be corrected by adoptive transfer of Treg cells from naive animals. Similarly, a lack of signaling through CD28/CD80 interaction is associated with reduced number and functionality of Treg cells, suggesting that this receptor/ligand system plays an important role in the development and function of Treg cells.

[0483] In certain embodiments, the present disclosure features Treg costimulatory polypeptides that are exogenous polypeptides that expand regulatory T-cells (Tregs) cells. In some embodiments, the Treg costimulatory polypeptides expand Treg cells by stimulating at least one of three signals involved in Treg cell development. Signal 1 involves TCR, and can be stimulated with antibodies, such as anti-CD3 antibodies, or with antigens that signals through TCR. Signal 2 can be mediated by several different molecules, including immune co-stimulatory molecules such as CD80 and 4-1BBL. Signal 3 is transduced via cytokines, such as IL-2, or TGFβ. In some embodiments, the Treg costimulatory polypeptides stimulate one of these signals. In another embodiment, the Treg costimulatory polypeptides stimulate two of these signals. In yet another embodiment, the Treg costimulatory polypeptides stimulate three of these signals.

[0484] Signal 1

[0485] Antigens useful as Treg costimulatory polypeptides for stimulating Signal 1 include antigens associated with a target disease or condition. For example, autoantigens and insulin (particularly suitable for treating type 1 diabetes), collagen (particularly suitable for treating rheumatoid arthritis), myelin basic protein (particularly suitable for treating multiple sclerosis) and MHC (for treating and preventing foreign graft rejection). The antigens may be administered as part of a conjugate. Optionally, the antigen is provided as part of an MHC/antigen complex. In this embodiment, the MHC and antigen can independently be foreign or syngeneic. For example donor MHC and an allogenic or syngeneic antigen can be used.

[0486] Signal 2

[0487] Exemplary Treg costimulatory polypeptides for stimulating Signal 2 include members of the B7 and TNF families, for example B7 and CD28 family members, shown below in Table 10, and TNF family members shown in Table 11.

TABLE 10
Treg Costimulatory Polypeptides: B7 and CD28 Family Members

| LIGAND | RECEPTOR |
|---|---|
| B7.1 (CD80) | CD28, CTLA-4 (CD 152) |
| B7.2 (CD86) | CD28, CTLA-4 |
| ICOSL (B7h, B7-H2, B7RP-1, | ICOS (AILIM) |
| GL5O, LICOS) | |
| PD-L1 (B7-H1) | PD-1 |
| PD-L2 (B7-DC) | PD-1 |
| B7-H3 | Unknown |
| B7-H4 (B7x; B7S1) | Unknown (BTLA?) |
| Unknown (HVEM*) | BTLA |
| ICOSL (B7h, B7-H2, B7RP-1, | ICOS (AILIM) |

TABLE 11
Treg Costimulatory Polypeptides: TNF Family Members

| LIGAND | RECEPTOR |
|---|---|
| OX40L | OX40 (CD134) |
| 4-1BBL | 4-1BB (CD137) |
| CD40L (CD154) | CD40 |
| CD27L (CD70) | CD27 |
| CD30L | CD30 |
| LIGHT | HVEM, LTβR, DcR3 |
| GITRL | GITR |
| BAFF (BLyS) ** | BAFF-R, TACI, BCMA |
| APRIL ** | TACI, BCMA |
| VEGI/TL1A | DR3 |
| TNF alpha (mutants) | TNFR2 |

[0488] Signal 3

[0489] Exemplary Treg costimulatory polypeptides for stimulating Signal 3 include cytokines and growth factors that stimulate Signal 3, such as IL-2, IL-4, and TGF-β (including TGF-β1, TGF-β2 and TGF-β3). IL-2 and IL-4 moieties useful in immunotherapeutic methods are known in the art. See, e.g., Earle et al., 2005, supra; Thorton et al., 2004, J. Immunol. 172: 6519-23; Thorton et al., 2004, Eur. J. Immunol. 34: 366-76. In accordance with one embodiment, the mature portion of the cytokine is used.

[0490] In some embodiments, the Treg costimulatory polypeptide is CD25-specific IL-2. In some embodiments, the Treg costimulatory polypeptide is TNFR2-specific TNF. In some embodiments, the Treg costimulatory polypeptide is an anti-DR3 agonist (VEGI/TL1A specific). In some embodiments, the Treg costimulatory peptide is 4-1BBL. In some embodiments, the Treg costimulatory peptide is TGFbeta.

[0491] In other embodiments, the present disclosure features Treg co-inhibitory polypeptides that are exogenous polypeptides that inhibit Treg cells. In certain embodiments, Treg inhibition is useful in the treatment of cancer, for example, by targeting chemokines that are involved in Treg trafficking. Other Treg inhibitors can target any of the receptors listed in Tables 10 or 11, for example, anti-OX40, anti-GITR or anti-CTLA4, or TLR ligands.

[0492] In some embodiments, the Treg costimulatory polypeptides, or an active fragment thereof, can be linked or expressed as a fusion protein with a binding pair member for use in accordance with the present invention. An exemplary binding pair is biotin and streptavidin (SA) or avidin.

[0493] In some embodiments, the Treg costimulatory polypeptides, or an active fragment thereof, is part of a fusion protein, comprising a Treg costimulatory polypeptide and a binding pair member, such as CSA. Fusion proteins can be made by any of a number of different methods known in the art. For example, one or more of the component polypeptides of the fusion proteins can be chemically synthesized or can be generated using well known recombinant nucleic acid technology. (As used herein, “nucleic acid” refers to RNA or DNA.) Nucleic acid sequences useful in the present invention can be obtained using, for example, the polymerase chain reaction (PCR). Various PCR methods are described, for example, in PCR Primer: A Laboratory Manual, Dieffenbach 7 Dveksler, Eds., Cold Spring Harbor Laboratory Press, 1995. Fusions are discussed in more detail herein below.

[0494] The conjugate may include a linker such as a peptide linker between the binding pair member and the costimulatory moiety. The linker length and composition may be chosen to enhance the activity of either functional end of the moiety. The linker may be greater than 20 amino acids long. In some embodiments, the linker is generally from about 3 to about 30 amino acids long, for example about 5 to about 20 amino acids long, about 5 to about 15 amino acids long, about a to about 10 amino acids long. However, longer or shorter linkers may be used or the linker may be dispensed with entirely. Flexible linkers (e.g. (Gly4Ser)3 (SEQ ID NO: 1)) such as have been used to connect heavy and light chains of a single chain antibody may be used in this regard. See, e.g., Huston et al., 1988, Proc. Nat. Acad. Sci. USA, 85: 5879-5883; U.S. Pat. Nos. 5,091,513, 5,132,405, 4,956,778; 5,258,498, and 5,482,858, the entireties of each of which is incorporated by reference herein. Other linkers are FENDAQAPKS (SEQ ID NO: 717) or LQNDAQAPKS (SEQ ID NO: 718). One or more domains of an immunoglobulin Fc region (e.g CH1, CH2 and/or CH3) also may be used as a linker.

[0495] In certain embodiments, the polypeptide is an exogenous Treg costimulatory polypeptide as described herein. An exemplary Treg costimulatory polypeptide includes:

[0496] a) a naturally occurring form of the human polypeptide;

[0497] b) the human polypeptide having a sequence appearing in a database, e.g., GenBank database, on Dec. 22, 2017;

[0498] c) a human polypeptide having a sequence that differs by no more than 1, 2, 3, 4, 5 or 10 amino acid residues from a sequence of a) or b);

[0499] d) a human polypeptide having a sequence that differs at no more than 1, 2, 3, 4, 5 or 10% its amino acids residues from a sequence of a) or b);

[0500] e) a human polypeptide having a sequence that does not differ substantially from a sequence of a) or b); or

[0501] f) a human polypeptide having a sequence of c), d), or e) that does not differ substantially in a biological activity, e.g., an enzymatic activity (e.g., specificity or turnover) or binding activity (e.g., binding specificity or affinity) from a human polypeptide having the sequence of a) or b). Candidate peptides under f) can be made and screened for similar activity as described herein and would be equivalent hereunder if expressed in engineered erythroid cells as described herein).

[0502] In embodiments, an exogenous Treg costimluatory polypeptide comprises a human polypeptide or fragment thereof, e.g., all or a fragment of a human polypeptide of a), b), c), d), e), or f) of the preceding paragraph. In an embodiment, the exogenous Treg costimulatory polypeptide comprises a fusion polypeptide comprising all or a fragment of a human polypeptide of a), b), c), d), e), or f) of the preceding paragraph and additional amino acid sequence. In an embodiment the additional amino acid sequence comprises all or a fragment of human polypeptide of a), b), c), d), e), or f) of the preceding paragraph for a different human Treg costimulatory polypeptide.

[0503] In some embodiments, the aAPC presents, e.g. comprises on the cell surface, at least two, at least 3, at least 4, or at least 5 exogenous Treg costimulatory polypeptides.

[0504] In some embodiments, the one or more Treg co-stimulatory or co-inhibitory polypeptides include or are fused to a membrane anchor. In some embodiments, the membrane anchor is selected from a sequence set forth in Table 3. In some embodiments, the one or more Treg co-stimluatory or co-inhibitory polypeptides include or are fused to a leader sequence. In some embodiments, the leader sequence is selected from a sequence set forth in Table 2.

### Exogenous Metabolite-Altering Polypeptides

[0505] In some embodiments of the present invention, an exogenous metabolite-altering polypeptide refers to any polypeptide involved in the catabolism or anabolism of a metabolite in a cell, wherein the metabolite-altering polypeptide can affect the metabolism of a T cell. Exemplary metabolite-depleting polypeptides as described herein alter the level of metabolites in the cell's local environment. For example, in some embodiments, a metabolite-depleting polypeptide promotes the oxidative catabolism of tryptophan.

[0506] Exemplary metabolite-altering polypeptides include CD39, CD73, arginase (Arg1) that can be used for the depletion of arginine, indoleamine 2,3-dioxygenase (IDO) which can be used for the depletion of tryptophan; tryptophan 2,3-dioxygenase (TDO-2) inhibitors that can be used for the depletion of tryptophan; tryptophan 5-hydroxylase (TPH) inhibitors that reduce 5-HT synthesis and can be used for the depletion of tryptophan; cyclooxyegnase-2 (COX-2) and prostaglandin (PGE) synthase (PGES), which can be used for the generation of prostaglandin E2 (PGE2); and inducible nitric oxide synthase (iNOS), that can be used for the generation of NO.

[0507] In certain embodiments, the polypeptide is an exogenous metabolite-altering polypeptide as described herein. An exemplary metabolite-altering polypeptide includes:

[0508] a) a naturally occurring form of the human polypeptide;

[0509] b) the human polypeptide having a sequence appearing in a database, e.g., GenBank database, on Dec. 22, 2017;

[0510] c) a human polypeptide having a sequence that differs by no more than 1, 2, 3, 4, 5 or 10 amino acid residues from a sequence of a) or b);

[0511] d) a human polypeptide having a sequence that differs at no more than 1, 2, 3, 4, 5 or 10% its amino acids residues from a sequence of a) or b);

[0512] e) a human polypeptide having a sequence that does not differ substantially from a sequence of a) or b); or

[0513] f) a human polypeptide having a sequence of c), d), or e) that does not differ substantially in a biological activity, e.g., an enzymatic activity (e.g., specificity or turnover) or binding activity (e.g., binding specificity or affinity) from a human polypeptide having the sequence of a) or b). Candidate peptides under f) can be made and screened for similar activity as described herein and would be equivalent hereunder if expressed in engineered erythroid cells as described herein).

[0514] In embodiments, an exogenous metabolite-altering polypeptide comprises a human polypeptide or fragment thereof, e.g., all or a fragment of a human polypeptide of a), b), c), d), e), or f) of the preceding paragraph. In an embodiment, the exogenous metabolite-altering polypeptide comprises a fusion polypeptide comprising all or a fragment of a human polypeptide of a), b), c), d), e), or f) of the preceding paragraph and additional amino acid sequence. In an embodiment the additional amino acid sequence comprises all or a fragment of human polypeptide of a), b), c), d), e), or f) of the preceding paragraph for a different human metabolite-altering polypeptide.

[0515] In some embodiments, the one or more exogenous metabolite-altering polypeptides include or are fused to a membrane anchor. In some embodiments, the membrane anchor is selected from a sequence set forth in Table 3. In some embodiments, the one or more exogenous metabolite-altering polypeptides include or are fused to a leader sequence. In some embodiments, the leader sequence is selected from a sequence set forth in Table 2.

### Cytokines/Chemokines

[0516] Additionally, the disclosure encompasses an aAPC transduced with a nucleic acid encoding at least one cytokine, at least one chemokine, or both. Thus, the disclosure encompasses a cytokine, including a full-length, fragment, homologue, variant or mutant of the cytokine. A cytokine includes a protein that is capable of affecting the biological function of another cell. A biological function affected by a cytokine can include, but is not limited to, cell growth, cell differentiation or cell death. Preferably, a cytokine of the present disclosure is capable of binding to a specific receptor on the surface of a cell, thereby affecting the biological function of a cell.

[0517] A preferred cytokine includes, among others, a hematopoietic growth factor, an interleukin, an interferon, an immunoglobulin superfamily molecule, a tumor necrosis factor family molecule and/or a chemokine. A more preferred cytokine of the disclosure includes a granulocyte macrophage colony stimulating factor (GM-CSF), tumor necrosis factor alpha (TNFα), tumor necrosis factor beta (TNFβ), macrophage colony stimulating factor (M-CSF), interleukin-1 (IL-1), interleukin-2 (IL-2), interleukin-4 (IL-4), interleukin-5 (IL-5), interleukin-6 (IL-6), interleukin-7 (IL-7), interleukin-10 (IL-10), interleukin-12 (IL-12), interleukin-15 (IL-15), interleukin-21 (IL-21), interleukin-35 (IL-35), interferon alpha (IFN-α), interferon beta (IFN-β), interferon gamma (IFN-γ), and IGIF, among many others.

[0518] A chemokine, including a homologue, variant, mutant or fragment thereof, encompasses an alpha-chemokine or a beta-chemokine, including, but not limited to, a C5a, interleukin-8 (IL-8), monocyte chemotactic protein 1alpha (MIP1a), monocyte chemotactic protein 1 beta (MIP1β), monocyte chemoattractant protein 1 (MCP-1), monocyte chemoattractant protein 3 (MCP-3), platelet activating factor (PAFR), N-formyl-methionyl-leucyl-[³H]phenylalanine (FMLPR), leukotriene B₄ (LTB₄R), gastrin releasing peptide (GRP), RANTES, eotaxin, lymphotactin, IP10, 1-309, ENA78, GCP-2, NAP-2 and/or MGSA/gro. One skilled in the art would appreciate, once armed with the teachings provided herein, that the disclosure encompasses a chemokine and a cytokine, such as are well-known in the art, as well as any discovered in the future.

[0519] In some embodiments, the cytokine on the aAPC serves as a polypeptide for stimulating Signal 3. It will be understood that in some embodiments, the aAPCs of the disclosure can expand and/or activate T cells by stimulating all three signals involved in T cell development. Signal 1 involves TCR, and can be stimulated with antigens that signal through TCR. Signal 2 can be mediated by several different molecules, including any immune co-stimulatory molecules described herein, such as 4-1BBL. Signal 3 can be transduced via cytokines, such as IL-15. Without being bound by theory, it is thought that the presence of signal 3, for example from a third exogenous polypeptide on the aAPC, in addition to signals 1 and 2, from a first and second exogenous polypeptide, respectively, e.g., an antigen and costimulatory polypeptide as described herein, increases the capacity of the aAPCs to boost the memory T cell population and thereby provide longer efficacy, e.g., efficacy against a relapse of a tumor or re-challenge with an infectious agent. In some embodiments, the polypeptide for stimulating Signal 3 is IL-15. In some embodiments, the aAPC comprises a third exogenous polypeptide that stimulates Signal 3. In one embodiment, the third exogenous polypeptide that stimulates Signal 3 is IL15.

[0520] In some embodiments, an engineered erythroid cell, e.g., enucleated cell, comprises one or more (e.g., 2, 3, 4, 5, or more) cytokine receptor subunits from Table 12 or cytokine-binding variants or fragments thereof. In some embodiments, an engineered erythroid cell comprises two or three (e.g., all) cytokine receptor subunits from a single row of Table 12 or cytokine-binding variants or functional fragments thereof. The cytokine receptors can be present on the surface of the erythroid cell. The expressed receptors typically have the wild type human receptor sequence or a variant or fragment thereof that is able to bind and sequester its target ligand. In embodiments, two or more cytokine receptor subunits are linked to each other, e.g., as a fusion protein.

[0521] In embodiments, one or more (e.g., 2 or all) of the cytokines are fused to transmembrane domains (e.g., a GPA transmembrane domain or other transmembrane domain described herein), e.g., such that the cytokine is on the surface of the erythroid cell. In embodiments, the erythroid cell further comprises a targeting moiety, e.g., an address moiety or targeting moiety described in WO2007030708, e.g., in pages 34-45 therein, which application is herein incorporated by reference in its entirety.

[0522] In some embodiments, the one or more cytokines include or are fused to a membrane anchor. In some embodiments, the membrane anchor is selected from a sequence set forth in Table 3. In some embodiments, the one or more cytokines include or are fused to a leader sequence. In some embodiments, the leader sequence is selected from a sequence set forth in Table 2.

TABLE 12
Cytokines and Receptors

| Name | Cytokine Receptor(s)(Da) and Form |
|---|---|
| Interleukins | |
| IL-1-like | |
| IL-1α | CD121a, CDw121b |
| IL-1β | CD121a, CDw121b |
| IL-1RA | CD121a |
| IL-18 | IL-18Rα, β |
| Common g chain (CD132) | |
| IL-2 | CD25, 122, 132 |
| IL-4 | CD124, 213a13, 132 |
| IL-7 | CD127, 132 |
| IL-9 | IL-9R, CD132 |
| IL-13 | CD213a1, 213a2, |
| IL-15 | IL-15Ra, CD122, 132 |
| IL-21 | IL21R |
| Common b chain (CD131) | |
| IL-3 | CD123, CDw131 |
| IL-5 | CDw125, 131 |
| Also related | |
| GM-CSF | CD116, CDw131 |
| IL-6-like | |
| IL-6 | CD126, 130 |
| IL-11 | IL-11Ra, CD130 |
| Also related | |
| G-CSF | CD114 |
| IL-12 | CD212 |
| IL-35 | IL35R |
| LIF | LIFR, CD130 |
| OSM | OSMR, CD130 |
| IL-10-like | |
| IL-10 | CDw210 |
| IL-20 | IL-20Rα, β |
| Others | |
| IL-14 | IL-14R |
| IL-16 | CD4 |
| IL-17 | CDw217 |
| Interferons | |
| IFN-α | CD118 |
| IFN-β | CD118 |
| IFN-γ | CDw119 |
| TNF | |
| CD154 | CD40 |
| LT-β | LTβR |
| TNF-α | CD120a, b |
| TNF-β (LT-α) | CD120a, b |
| 4-1BBL | CD137 (4-1BB) |
| APRIL | BCMA, TACI |
| CD70 | CD27 |
| CD153 | CD30 |
| CD178 | CD95 (Fas) |
| GITRL | GITR |
| LIGHT | LTbR, HVEM |
| OX40L | OX40 |
| TALL-1 | BCMA, TACI |
| TRAIL | TRAILR1-4 |
| TWEAK | Apo3 |
| TRANCE | RANK, OPG |
| TGF-β | |
| TGF-β1 | TGF-βR1 |
| TGF-β2 | TGF-βR2 |
| TGF-β3 | TGF-βR3 |
| Miscellaneous hematopoietins | |
| Epo | EpoR |
| Tpo | TpoR |
| Flt-3L | Flt-3 |
| SCF | CD117 |
| M-CSF | CD115 |
| MSP | CDw136 |

### Engineered Erythroid Cells

[0523] In some aspects, the present disclosure provides an artificial antigen presenting cell (aAPC) engineered to activate T cells, wherein the aAPC comprises an erythroid cell or an enucleated cell, wherein the erythroid cell or enucleated cell presents, e.g. comprises on the cell surface, an exogenous antigenic polypeptide disclosed in Table 1. Thus, the present disclosure encompasses an aAPC comprising a nucleic acid encoding an antigen of interest, as shown in Table 1. In certain embodiments, at least one exogenous antigenic polypeptide is a tumor antigen, an autoimmune disease antigen, a viral antigen, or a bacterial antigen. In some embodiments an enucleated cell is a erythroid cell, for example, that has lost its nucleus through differentiation from an erythrocyte precursor cell. It will be understood, however, that not all enucleated cells are erythroid cells and, accordingly, enucleated cells encompassed herein can also include, e.g., platelets. In some embodiments, enucleated cells are not platelets and are therefore platelet free enucleated cells. In certain aspects of the disclosure, the erythroid cell is a reticulocyte or an erythrocyte (red blood cell (RBC)). Erythrocytes offer a number of advantages over other cells, including being non-autologous (e.g., substantially lack major histocompatibility complex (MHC)), having longer circulation time in a subject (e.g. greater than 30 days), and being amenable to production in large numbers. In certain aspects of the disclosure, the engineered erythroid cells are nucleated.

[0524] The erythroid cell optionally further comprises a second, different, exogenous polypeptide. The erythroid cell optionally further comprises second and third, different, exogenous polypeptides. The erythroid cell optionally further comprises a second, third and fourth, different, exogenous polypeptides. The erythroid cell optionally further comprises a second, third, fourth and fifth, different, exogenous polypeptides. In some embodiments, the erythroid cell optionally further comprises 1, 2, 3, 4, 5, 6, 7, 8, 9, 10, 11, 12, 13, 14, 15, 16, 17, 18, 19, 20 or more different, exogenous polypeptides. In some embodiments, the erythroid cell optionally further comprises between 1-100, 1-200 different, exogenous polypeptides.

[0525] In certain embodiments, the erythroid cell (e.g. an engineered erythroid cell) comprising an antigen (e.g. an exogenous antigenic polypeptide), can process and present the antigen in the context of an exogenous antigen-presenting polypeptide, e.g. an MHC (where the cell is also transduced with a nucleic acid encoding a MHC class I or class II molecule), wherein the exogenous antigenic polypeptide is specifically bound to the exogenous antigen-presenting polypeptide (e.g. an MHC class I or class II molecule), thereby producing antigen-specific T cells and expanding a population thereof. Therefore, an antigen of interest can be introduced into an aAPC of the disclosure, wherein the aAPC then presents the antigen in the context of the MHC Class I or II complex (e.g., the antigenic polypeptide is specifically bound to the MHC Class I or II complex), i.e., the MHC molecule is “loaded” with the antigen, and the aAPC can be used to produce an antigen-specific T cell. Thus, in some aspects, the present disclosure provides an artificial antigen presenting cell (aAPC) engineered to activate T cells, wherein the aAPC comprises an engineered erythroid cell, wherein the engineered erythroid cell presents, e.g. comprises on the cell surface, an exogenous antigen-presenting polypeptide and an exogenous antigenic polypeptide, wherein the exogenous antigenic polypeptide is specifically bound to the exogenous antigen-presenting polypeptide (e.g. an MHC class I or class II molecule).

[0526] In other embodiments, the erythroid cell comprises one or more antigens that are not processed and presented by an MHC, that is, the present disclosure provides an artificial antigen presenting cell (aAPC) engineered to activate T cells without MHC restriction. In some embodiments, the present disclosure provides an aAPC including antibodies against CD3 (including single-chain antibodies). In some embodiments, antibodies against CD3 (including single-chain antibodies) are expressed on the aAPC surface. In some embodiments, the present disclosure provides an aAPC including antibodies against CD4 and CD8. In other embodiments, the antibodies against CD4 and CD8 are expressed on the aAPC surface, to activate their respective immune cell populations.

[0527] In other aspects, the present disclosure provides an artificial antigen presenting cell (aAPC) engineered to activate T cells, wherein the aAPC comprises an engineered erythroid cell, wherein the engineered erythroid cell presents, e.g. comprises on the cell surface, an exogenous antigenic polypeptide and an exogenous costimulatory polypeptide.

[0528] In some aspects, the present disclosure provides, an artificial antigen presenting cell (aAPC) engineered to activate T cells, wherein the aAPC comprises an erythroid cell, wherein the erythroid cell presents, e.g. comprises on the cell surface, an exogenous antigen-presenting polypeptide and an exogenous antigenic polypeptide, wherein the exogenous antigenic polypeptide is specifically bound to the exogenous antigen-presenting polypeptide, wherein the exogenous antigen-presenting polypeptide is an MHC class I polypeptide or single chain fusion or an MHC class II polypeptide or single chain fusion. In some embodiments of the above aspects and embodiments, the engineered erythroid cell is an enucleated erythroid cell.

[0529] In other aspects, the present disclosure provides, an artificial antigen presenting cell (aAPC) engineered to activate and expand T cells, wherein the aAPC comprises an engineered erythroid cell, wherein the engineered erythroid cell presents, e.g. comprises on the cell surface, an exogenous antigen-presenting polypeptide, an exogenous antigenic polypeptide, an exogenous costimulatory polypeptide, and an exogenous T cell expansion polypeptide, wherein the exogenous antigenic polypeptide is specifically bound to the exogenous antigen-presenting polypeptide (e.g. an MHC class I or class II molecule).

[0530] In some embodiments, the aAPC is capable of activating a T cell contacted with the aAPC.

[0531] In another embodiment, stimulating comprises activation of CD8+ T cells, activation of CD4+ T cells, stimulation of cytotoxic activity of T cells, stimulation of cytokine secretion by T cells, and/or any combination thereof.

[0532] In some embodiments of the above aspects and embodiments, the engineered erythroid cell is an enucleated cell.

[0533] As another example, the exogenous polypeptides comprise a T cell activating ligand and an agent which inhibits an immune inhibitory molecule (e.g., an immune inhibitory receptor), e.g. CD80 and anti-PD1, in an immuno-oncology setting. In another embodiment, one agent is an activating 4-1BBL, or fragment or variant thereof, and a second agent an antibody molecule that blocks PD1 signaling (e.g., an antibody molecule to PD1 or PD-L1). Thus, in embodiments, a target T cell is both activated and prevented from being repressed.

[0534] In some embodiments the objective is to activate or to inhibit T cells. To ensure that T cells are preferentially targeted over other immune cells that may also express either activating or inhibitory receptors as described herein, one of the exogenous polypeptides on the erythroid cell may comprise a targeting moiety, e.g., an antibody molecule that binds the T cell receptor (TCR) or another T cell marker. Targeting moieties are described in more detail hereinbelow. In some embodiments, a specific T cell subtype or clone may be enhanced or inhibited. In some embodiments, one or more of the exogenous polypeptides on the erythroid cell is a peptide-MHC molecule that will selectively bind to a T cell receptor in an antigen-specific manner.

[0535] In some aspects, the present disclosure provides an artificial antigen presenting cell (aAPC) engineered to suppress T cell activity, wherein the aAPC comprises an erythroid cell, wherein the erythroid cell presents, e.g. comprises on the cell surface, an exogenous antigen-presenting polypeptide, an exogenous antigenic polypeptide and at least one exogenous co-inhibitory polypeptide disclosed in Table 7, wherein the exogenous antigenic polypeptide is specifically bound to the exogenous antigen-presenting polypeptide (e.g. an MHC class I or class II molecule).

[0536] In other aspects, the present disclosure provides an artificial antigen presenting cell (aAPC) engineered to suppress T cell activity, wherein the aAPC comprises an erythroid cell, wherein the erythroid cell presents, e.g. comprises on the cell surface, an exogenous antigen-presenting polypeptide, an exogenous antigenic polypeptide disclosed in Table 1, and at least one exogenous co-inhibitory polypeptide, wherein the exogenous antigenic polypeptide is specifically bound to the exogenous antigen-presenting polypeptide (e.g. an MHC class I or class II molecule).

[0537] In some aspects, the present disclosure provides an artificial antigen presenting cell (aAPC) engineered to suppress T cell activity, wherein the aAPC comprises an erythroid cell, wherein the erythroid cell presents, e.g. comprises on the cell surface, an exogenous antigen-presenting polypeptide, an exogenous antigenic polypeptide, and at least one metabolite-altering polypeptide, wherein the exogenous antigenic polypeptide is specifically bound to the exogenous antigen-presenting polypeptide (e.g. an MHC class I or class II molecule).

[0538] In other aspects, the present disclosure provides, an artificial antigen presenting cell (aAPC) engineered to suppress T effector cells, wherein the aAPC comprises an engineered erythroid cell, wherein the engineered erythroid cell presents, e.g. comprises on the cell surface, an exogenous antigen-presenting polypeptide, an exogenous antigen, an exogenous proliferation inhibitor, and an exogenous amino acid-depleting polypeptide, wherein the exogenous antigenic polypeptide is specifically bound to the exogenous antigen-presenting polypeptide (e.g. an MHC class I or class II molecule).

[0539] In some embodiments, the aAPC is capable of suppressing T cells contacted with the aAPC. In other embodiments, the aAPC is capable of suppressing a T cell that interacts with the aAPC. In further embodiments, the suppressing comprises inhibition of proliferation of a T cell, anergizing of a T cell, or induction of apoptosis of a T cell.

[0540] In some aspects, the present disclosure provides, an artificial antigen presenting cell (aAPC) engineered to activate a regulatory T cell (Treg cell), wherein the aAPC comprises an erythroid cell, wherein the erythroid cell presents, e.g. comprises on the cell surface, an exogenous antigen-presenting polypeptide and an exogenous antigenic polypeptide, wherein the exogenous antigenic polypeptide is specifically bound to the exogenous antigen-presenting polypeptide (e.g. an MHC class I or class II molecule). In some embodiments, the aAPC further presents, e.g. comprises on the cell surface, an exogenous Treg expansion polypeptide.

[0541] In certain embodiments, the T cell of any one of the aspects and embodiments presented herein is a CD4+ T cell or a CD8+ T cell.

[0542] In some embodiments, the erythroid cell comprises an exogenous polypeptide (e.g., exogenous antigenic polypeptides, exogenous antigen-presenting polypeptides, exogenous costimulatory polypeptides, exogenous coinhibitory polypeptides, exogenous amino acid-depleting polypeptides, and exogenous Treg costimulatory polypeptides), wherein the erythroid cell optionally further comprises a second exogenous polypeptide (e.g., exogenous antigenic polypeptides, exogenous antigen-presenting polypeptides, exogenous costimulatory polypeptides, exogenous coinhibitory polypeptides, exogenous amino acid-depleting polypeptides, and exogenous Treg costimulatory polypeptides) is an exogenous polypeptide described herein.

[0543] In some embodiments of the above aspects and embodiments, the engineered erythroid cell is an enucleated cell.

[0544] The present disclosure should also be construed to encompass “mutants,” “derivatives,” and “variants” of the exogenous polypeptides described herein (or of the DNA encoding the same) which mutants, derivatives and variants are costimulatory ligands, cytokines, antigens (e.g., tumor cell, viral, and other antigens), which are altered in one or more amino acids (or, when referring to the nucleotide sequence encoding the same, are altered in one or more base pairs) such that the resulting peptide (or DNA) is not identical to the sequences recited herein, but has the same biological property as the peptides disclosed herein, in that the peptide has biological/biochemical properties of a costimulatory ligand, cytokine, antigen, and the like, of the present invention (e.g., expression by an aAPC where contacting the aAPC expressing the protein with a T cell, mediates proliferation of, or otherwise affects, the T cell). Any number of procedures may be used for the generation of mutant, derivative or variant forms of a protein of the invention using recombinant DNA methodology well known in the art such as, for example, that described in Sambrook and Russell (2001, Molecular Cloning, A Laboratory Approach, Cold Spring Harbor Press, Cold Spring Harbor, N.Y.), and Ausubel et al. (2002, Current Protocols in Molecular Biology, John Wiley & Sons, NY). Procedures for the introduction of amino acid changes in a protein or polypeptide by altering the DNA sequence encoding the polypeptide are well known in the art and are also described in these, and other, treatises.

[0545] The present disclosure contemplates that functional fragments or variants thereof of the proteins listed in Tables 1-24 can be made and screened for similar activity as described herein and would be equivalent hereunder if expressed in engineered erythroid cells as described herein.

[0546] The skilled artisan would appreciate, once armed with the teachings provided herein, that the aAPC of the disclosure is not limited in any way to any particular antigen, cytokine, costimulatory ligand, antibody that specifically binds a costimulatory molecule, and the like. Rather, the disclosure encompasses an aAPC comprising numerous molecules, either all expressed under the control of a single promoter/regulatory sequence or under the control of more than one such sequence. Moreover, the disclosure encompasses administration of one or more aAPC of the disclosure where the various aAPCs encode different molecules. That is, the various molecules (e.g., costimulatory ligands, antigens, cytokines, and the like) can work in cis (i.e., in the same aAPC and/or encoded by the same contiguous nucleic acid or on separate nucleic acid molecules within the same aAPC) or in trans (i.e., the various molecules are expressed by different aAPCs).

### Engineered Erythroid Cells Comprising Three or More Exogenous Polypeptide

[0547] In embodiments, an engineered erythroid cell described herein comprises three or more, e.g., at least 4, 5, 6, 7, 8, 9, 10, 11, 12, 13, 14, 15, 16, 17, 18, 19, 20, 50, 100, 200, 500, or 1000 exogenous polypeptides. In embodiments, a population of erythroid cells described herein comprises three or more, e.g., at least 4, 5, 6, 7, 8, 9, 10, 11, 12, 13, 14, 15, 16, 17, 18, 19, 20, 50, 100, 200, 500, 1000, 2000, or 5000 exogenous polypeptides, e.g., wherein different erythroid cells in the population comprise different exogenous polypeptides or wherein different erythroid cells in the population comprise different pluralities of exogenous polypeptides.

### Tiling

[0548] In some embodiments, the first exogenous antigenic polypeptide and the second exogenous antigenic polypeptide have amino acid sequences which overlap. In certain embodiments, an aAPC is engineered to activate T cells, wherein the aAPC comprises an erythroid cell, wherein the erythroid cell presents, e.g. comprises on the cell surface, a first exogenous antigenic polypeptide and a second exogenous antigenic polypeptide, and wherein the first exogenous antigenic polypeptide and the second exogenous antigenic polypeptide have amino acid sequences which overlap by at least 2 amino acids. In some embodiments, the overlap is between 2 amino acids and 23 amino acids, for example the overlap is 2, 3, 4, 5, 6, 7, 8, 9, 10, 11, 12, 13, 14, 15, 16, 17, 18, 19, 20, 21, 22 or 23 amino acids. In some embodiments, the exogenous antigenic polypeptide is between 8-10 amino acids in length, and the overlap is between 6-8 amino acids. In some embodiments, the exogenous antigenic polypeptide is between 14-20 amino acids in length, and the overlap is between 12-18 amino acids. Tiling polypeptides in this way provides broader recognition of antigen. In some embodiments of the above aspects and embodiments, the engineered erythroid cell is an enucleated cell.

[0549] Methods for tiling polypeptides are known in the art, and are described, for example in Harding et al., which describes the development and testing of 15 mer polypeptides, overlapping by 12 amino acids, that were tested in a human CD4+ T-cell-based proliferative assay (Molecular Cancer Therapeutics, November 2005, Volume 4, Issue 11, incorporated by reference in its entirety herein). Sticker, et al. describes a human cell-based method to identify functional CD4(+) T-cell epitopes in any protein (J Immunol Methods. 2003 Oct. 1; 281(1-2): 95-108, incorporated by reference in its entirety herein).

### Modifications

[0550] One or more of the exogenous proteins may have post-translational modifications characteristic of eukaryotic cells, e.g., mammalian cells, e.g., human cells. In some embodiments, one or more (e.g., 2, 3, 4, 5, 6, 7, 8, 9, 10, or more) of the exogenous proteins are glycosylated, phosphorylated, or both. In vitro detection of glycoproteins can be accomplished on SDS-PAGE gels and Western Blots using a modification of Periodic acid-Schiff (PAS) methods. Cellular localization of glycoproteins can be accomplished utilizing lectin fluorescent conjugates known in the art. Phosphorylation may be assessed by Western blot using phospho-specific antibodies.

[0551] Post-translation modifications also include conjugation to a hydrophobic group (e.g., myristoylation, palmitoylation, isoprenylation, prenylation, or glypiation), conjugation to a cofactor (e.g., lipoylation, flavin moiety (e.g., FMN or FAD), heme C attachment, phosphopantetheinylation, or retinylidene Schiff base formation), diphthamide formation, ethanolamine phosphoglycerol attachment, hypusine formation, acylation (e.g. O-acylation, N-acylation, or S-acylation), formylation, acetylation, alkylation (e.g., methylation or ethylation), amidation, butyrylation, gamma-carboxylation, malonylation, hydroxylation, iodination, nucleotide addition such as ADP-ribosylation, oxidation, phosphate ester (O-linked) or phosphoramidate (N-linked) formation, (e.g., phosphorylation or adenylylation), propionylation, pyroglutamate formation, S-glutathionylation, S-nitrosylation, succinylation, sulfation, ISGylation, SUMOylation, ubiquitination, Neddylation, or a chemical modification of an amino acid (e.g., citrullination, deamidation, eliminylation, or carbamylation), formation of a disulfide bridge, racemization (e.g., of proline, serine, alanine, or methionine). In embodiments, glycosylation includes the addition of a glycosyl group to arginine, asparagine, cysteine, hydroxylysine, serine, threonine, tyrosine, or tryptophan, resulting in a glycoprotein. In embodiments, the glycosylation comprises, e.g., O-linked glycosylation or N-linked glycosylation.

[0552] In some embodiments, one or more of the exogenous polypeptides is a fusion protein, e.g., is a fusion with an endogenous red blood cell protein or fragment thereof, e.g., a transmembrane protein, e.g., GPA or a transmembrane fragment thereof. In some embodiments, one or more of the exogenous polypeptides is fused with a domain that promotes dimerization or multimerization, e.g., with a second fusion exogenous polypeptide, which optionally comprises a dimerization domain. In some embodiments, the dimerization domain comprises a portion of an antibody molecule, e.g., an Fc domain or CH3 domain. In some embodiments, the first and second dimerization domains comprise knob-in-hole mutations (e.g., a T366Y knob and a Y407T hole) to promote heterodimerization.

### Copy Number

[0553] In some embodiments, the first exogenous polypeptide and the second exogenous polypeptide have an abundance ratio of about 1:1, from about 2:1 to 1:2, from about 5:1 to 1:5, from about 10:1 to 1:10, from about 20:1 to 1:20, from about 50:1 to 1:50, from about 100:1 to 1:100 by weight or by copy number.

[0554] In some embodiments, the engineered erythroid cell comprises at least at least 10 copies, 100 copies, 1,000 copies, 5,000 copies 10,000 copies, 25,000 copies, 50,000 copies, or 100,000 copies of each of the first exogenous polypeptide and the second exogenous polypeptide. In some embodiments, the copy number of the first exogenous polypeptide is no more than 10%, 20%, 30%, 40%, 50%, 60%, 70%, 80%, or 90% greater, or no more than 2, 5, 10, 20, 50, 100, 200, 500, or 1000 times greater than the copy number of the second exogenous polypeptide. In some embodiments, the copy number of the second exogenous polypeptide is no more than 10%, 20%, 30%, 40%, 50%, 60%, 70%, 80%, or 90% greater, or no more than 2, 5, 10, 20, 50, 100, 200, 500, or 1000 times greater than the copy number of the first exogenous polypeptide. In some embodiments, the engineered erythroid cell is an enucleated cell. In some embodiments, the engineered erythroid cell is a nucleated cell.

[0555] In some embodiments, the first exogenous polypeptide comprises between about 50,000 to about 600,000 copies of the first exogenous polypeptide, for example about 50,000, 60,000, 60,000, 80,000, 90,000, 100,000, 110,000, 120,000, 130,000, 140,000, 150,000, 155,000, 160,000, 165,000, 170,000, 175,000, 180,000, 185,000, 190,000, 195,000, 200,000, 205,000, 210,000, 215,000, 220,000, 225,000, 230,000, 235,000, 240,000, 245,000, 250,000, 255,000, 260,000, 265,000, 270,000, 275,000, 280,000, 285,000, 290,000, 295,000, 300,000, 305,000, 310,000, 315,000, 320,000, 325,000, 330,000, 335,000, 340,000, 345,000, 350,000, 355,000, 360,000, 365,000, 370,000, 375,000, 380,000, 385,000, 390,000, 395,000, 400,000, 450,000, 500,000, 550,000, 600,000 copies of the first polypeptide. In some embodiments, the engineered erythroid cell comprises between about 50,000-600,000, between about 100,000-600,000, between about 100,000-500,000, between about 100,000-400,000, between about 100,000-150,000, between about 150,000-300,000, or between 150,000-200,000 copies of the first exogenous polypeptide. In some embodiments, the engineered erythroid cell comprises at least about 75,000 copies of the first exogenous polypeptide. In some embodiments, the engineered erythroid cell comprises at least about 100,000 copies of the first exogenous polypeptide. In some embodiments, the engineered erythroid cell comprises at least about 125,000 copies of the first exogenous polypeptide. In some embodiments, the engineered erythroid cell comprises at least about 150,000 copies of the first exogenous polypeptide. In some embodiments, the engineered erythroid cell comprises at least about 175,000 copies of the first exogenous polypeptide. In some embodiments, the engineered erythroid cell comprises at least about 200,000 copies of the first exogenous polypeptide. In some embodiments, the engineered erythroid cell comprises at least about 250,000 copies of the first exogenous polypeptide. In some embodiments, the engineered erythroid cell comprises at least about 300,000 copies of the first exogenous polypeptide. In some embodiments, the engineered erythroid cell comprises at least about 400,000 copies of the first exogenous polypeptide. In some embodiments, the engineered erythroid cell comprises at least about 500,000 copies of the first exogenous polypeptide. In some embodiments, the second exogenous polypeptide comprises between about 50,000 to about 600,000 copies of the second exogenous polypeptide, for example about 50,000, 60,000, 60,000, 80,000, 90,000, 100,000, 110,000, 120,000, 130,000, 140,000, 150,000, 155,000, 160,000, 165,000, 170,000, 175,000, 180,000, 185,000, 190,000, 195,000, 200,000, 205,000, 210,000, 215,000, 220,000, 225,000, 230,000, 235,000, 240,000, 245,000, 250,000, 255,000, 260,000, 265,000, 270,000, 275,000, 280,000, 285,000, 290,000, 295,000, 300,000, 305,000, 310,000, 315,000, 320,000, 325,000, 330,000, 335,000, 340,000, 345,000, 350,000, 355,000, 360,000, 365,000, 370,000, 375,000, 380,000, 385,000, 390,000, 395,000, 400,000, 450,000, 500,000, 550,000, 600,000 copies of the second polypeptide. In some embodiments, the engineered erythroid cell comprises between about 50,000-600,000, between about 100,000-600,000, between about 100,000-500,000, between about 100,000-400,000, between about 100,000-150,000, between about 150,000-300,000, or between 150,000-200,000 copies of the second exogenous polypeptide. In some embodiments, the engineered erythroid cell comprises at least about 75,000 copies of the second exogenous polypeptide. In some embodiments, the engineered erythroid cell comprises at least about 100,000 copies of the second exogenous polypeptide. In some embodiments, the engineered erythroid cell comprises at least about 125,000 copies of the second exogenous polypeptide. In some embodiments, the engineered erythroid cell comprises at least about 150,000 copies of the second exogenous polypeptide. In some embodiments, the engineered erythroid cell comprises at least about 175,000 copies of the second exogenous polypeptide. In some embodiments, the engineered erythroid cell comprises at least about 200,000 copies of the second exogenous polypeptide. In some embodiments, the engineered erythroid cell comprises at least about 250,000 copies of the second exogenous polypeptide. In some embodiments, the engineered erythroid cell comprises at least about 300,000 copies of the second exogenous polypeptide. In some embodiments, the engineered erythroid cell comprises at least about 400,000 copies of the second exogenous polypeptide. In some embodiments, the engineered erythroid cell comprises at least about 500,000 copies of the second exogenous polypeptide.

[0556] In some embodiments of the above aspects and embodiments, the engineered erythroid cell is an enucleated cell. In some embodiments of the above aspects and embodiments, the engineered erythroid cell is a nucleated cell.

### In Vivo Half-Life

[0557] In some embodiments, an exogenous polypeptide described herein, when included in or on an engineered erythroid cell or an enucleated cell and administered to a subject, exhibits a prolonged in vivo half-life as compared to a corresponding exogenous polypeptide that is administered by itself (i.e., not on or in a cell described herein). In some embodiments, the exogenous polypeptide has an in vivo half-life that is longer than the in vivo half-life of a corresponding exogenous polypeptide that is administered by itself, or the in vivo half-life of a corresponding pegylated version of the exogenous polypeptide that is administered by itself. In some embodiments, the exogenous polypeptide has an in vivo half-life of between about 24 hours and 240 days (e.g., 24 hours, 36 hours, 48 hours, 1 day, 2 days, 3 days, 4 days, 5 days, 6 days, 7 days, 8 days, 9 days, 10 days, 11 days, 12 days, 13 days, 14 days, 15 days, 16 days, 17 days, 18 days, 19 days, 20 days, 21 days, 22 days, 23 days, 24 days, 25 days, 26 days, 27 days, 28 days, 29 days, 30 days, 31 days, 32, days, 33 days, 34 days, 35 days, 36 days, 37 days, 38 days, 39 days, 40 days, 41 days, 42 days, 43 days, 44 days, 45 days, 46 days, 47 days, 48 days, 49 days, 50 days, 51 days, 52 days, 53 days, 54 days, 55 days, 56 days, 57 days, 58 days, 59 days, 60 days, 61 days, 62 days, 63 days, 64 days, 65 days, 66 days, 67 days, 68 days, 69 days, 70 days, 71 days, 72 days, 73 days, 74 days, 75 days, 76 days, 77 days, 78 days, 79 days, 80 days, 81 days, 82 days, 83 days, 84 days, 85 days, 86 days, 87 days, 88 days, 89 days, 90 days, 91 days, 92 days, 93 days, 94 days, 95 days, 96 days, 97 days, 98 days, 99 days, 100 days, 101 days, 102 days, 103 days, 104 days, 105 days, 106 days, 107 days, 108 days, 109 days, 110 days, 111 days, 112 days, 113 days, 114 days, 115 days, 116 days, 117 days, 118 days, 119 days, 120 days, 121 days, 122 days, 123 days, 124 days, 125 days, 126 days, 127 days, 128 days, 129 days, 130 days, 131 days, 132, days, 133 days, 134 days, 135 days, 136 days, 137 days, 138 days, 139 days, 140 days, 141 days, 142 days, 143 days, 144 days, 145 days, 146 days, 147 days, 148 days, 149 days, 150 days, 151 days, 152 days, 153 days, 154 days, 155 days, 156 days, 157 days, 158 days, 159 days, 160 days, 161 days, 162 days, 163 days, 164 days, 165 days, 166 days, 167 days, 168 days, 169 days, 170 days, 171 days, 172 days, 173 days, 174 days, 175 days, 176 days, 177 days, 178 days, 179 days, 180 days, 181 days, 182 days, 183 days, 184 days, 185 days, 186 days, 187 days, 188 days, 189 days, 190 days, 191 days, 192 days, 193 days, 194 days, 195 days, 196 days, 197 days, 198 days, 919 days, 200 days, 201 days, 202 days, 203 days, 204 days, 205 days, 206 days, 207 days, 208 days, 209 days, 210 days, 211 days, 212 days, 213 days, 214 days, 215 days, 216 days, 217 days, 218 days, 219 days, 220 days, 221 days, 222 days, 223 days, 224 days, 225 days, 226 days, 227 days, 228 days, 229 days, 230 days, 231 days, 232, days, 233 days, 234 days, 235 days, 236 days, 237 days, 238 days, 239 days, or 240 days. In some embodiments, the exogenous polypeptide has an in vivo half-life of greater than 1 day, 2 days, 3 days, 5 days, 10 days, 25 days, 50 days, 75 days, 100 days, 125 days, 150 days, 175 days, 200 days, 225 days, 235 days, or 250 days. In some embodiments, the exogenous polypeptide has an in vivo half-life of 1 week, 2 weeks, 3 weeks, 1 month, 2 months, 3 months, 4 months, 5 months, 6 months, 7 months, 8 months, 9 months, 10 months, 11 months, a year, or more.

[0558] In some embodiments, the aAPC of the present disclosure resides in circulation after administration to a subject for at least about 1 day to about 240 days (e.g., for at least about 1 day, 2 days, 3 days, 4 day, 5 days, 6 days, 7 days, 8 days, 9 days, 10 days, 11 days, 11 days, 12 days, 13 days, 14 days, 15 days, 16 days, 17 days, 18 days, 19 days, 20 days, 21 days, 22 days, 23 days, 24 days, 25 days, 26 days, 27 days, 28 days, 29 days, 30 days, 31 days, 32 days, 33 days, 34 days, 35 days, 36 days, 37 days, 38 days, 39 days, 40 days, 41 days, 42 days, 43 days, 44 days, 45 days, 46 days, 47 days, 48 days, 49 days, 50 days, 51 days, 52 days, 53 days, 54 days, 55 days, 56 days, 57 days, 58 days, 59 days, 60 days, 61 days, 62 days, 63 days, 64 days, 65 days, 66 days, 67 days, 68 days, 69 days, 70 days, 71 days, 72 days, 73 days, 74 days, 75 days, 76 days, 77 days, 78 days, 79 days, 80 days, 81 days, 82 days, 83 days, 84 days, 85 days, 86 days, 87 days, 88 days, 89 days, 90 days, 91 days, 92 days, 93 days, 94 days, 95 days, 96 days, 97 days, 98 days, 99 days, 100 days, 101 days, 102 days, 103 days, 104 days, 105 days, 106 days, 107 days, 108 days, 109 days, 110 days, 111 days, 112 days, 113 days, 114 days, 115 days, 116 days, 117 days, 118 days, 119 days, 120 days, 121 days, 122 days, 123 days, 124 days, 125 days, 126 days, 127 days, 128 days, 129 days, 130 days, 131 days, 132 days, 133 days, 134 days, 135 days, 136 days, 137 days, 138 days, 139 days 140 days, 141 days, 142 days, 143 days, 144 days, 145 days, 146 days, 147 days, 148 days, 149 days, 150 days, 151 days, 152 days, 153 days, 154 days, 155 days, 156 days, 157 days, 158 days, 159 days, 160 days, 161 days, 162 days, 163 days, 164 days, 165 days, 166 days, 167 days, 168 days, 169 days, 170 days, 171 days, 172 days, 173 days, 174 days, 175 days, 176 days, 177 days, 178 days, 179 days, 180 days, 181 days, 182 days, 183 days, 184 days, 185 days, 186 days, 187 days, 188 days, 189 days, 190 days, 191 days, 192 days, 193 days, 194 days, 195 days, 196 days, 197 days, 198 days, 199 days, 200 days, 201 days, 202 days, 203 days, 204 days, 205 days, 206 days, 207 days, 208 days, 209 days, 210 days, 211 days, 212 days, 213 days, 214 days, 215 days, 216 days, 217 days, 218 days, 219 days, 220 days, 221 days, 222 days, 223 days, 224 days, 225 days, 226 days, 227 days, 228 days, 229 days, 230 days, 231 days, 232 days, 233 days, 234 days, 235 days, 236 days, 237 days, 238 days, 239 days, or 240 days.

[0559] In some embodiments, the aAPC of the present disclosure presents the antigenic polypeptide during circulation of aAPCs through the vasculature. In some embodiments, the aAPC of the present disclosure presents the antigenic polypeptide in the spleen.

### Gene Editing

[0560] In some aspects, the disclosure features a method of making an immunologically compatible artificial antigen presenting cell (aAPC), wherein the aAPC comprises an engineered erythroid cell that expresses an exogenous antigenic polypeptide, the method comprising contacting the aAPC with a nuclease and at least one gRNA which cleave an endogenous MHC nucleic acid, wherein the endogenous MHC nucleic acid is repaired by a gene editing pathway and results in a decrease in the level of expression of the endogenous MHC nucleic acid, thereby making the immunologically compatible aAPC. In some embodiments, the engineered erythroid cell is an enucleated cell. In some embodiments, the engineered erythroid cell is a nucleated cell.

[0561] In some embodiments, a cell is genetically modified using a nuclease that is targeted to one or more selected DNA sequences. Such methods may be used to induce precise cleavage at selected sites in endogenous genomic loci. Genetic engineering in which DNA is inserted, replaced, or removed from a genome, e.g., at a defined location of interest, using targetable nucleases, may be referred to as “genome editing”. Examples of such nucleases include zinc-finger nucleases (ZFNs), Transcription activator-like effector nuclease (TALENs), engineered meganuclease homing endonucleases, and RNA directed nucleases such as CRISPR (clustered regularly interspaced short palindromic repeats)-associated (Cas) nucleases, e.g., derived from type II bacterial CRISPR/Cas systems (e.g., Cas9).

[0562] In some embodiments, an alteration is first introduced using CRISPR (i.e. increasing endogenous expression of MHCI). Then, the antigen for presentation is also introduced via CRISPR and processed internally.

[0563] In some embodiments the nuclease comprises a DNA cleavage domain and a DNA binding domain (DBD) that targets the nuclease to a particular DNA sequence, thereby allowing the nuclease to be used to engineer genomic alterations in a sequence-specific manner. The DNA cleavage domain may create a double-stranded break (DSB) or nick at or near the sequence to which it is targeted. ZFNs comprise DBDs selected or designed based on DBDs of zinc finger (ZF) proteins. DBDs of ZF proteins bind DNA in a sequence-specific manner through one or more zinc fingers, which are regions of amino acid sequence whose structure is stabilized through coordination of a zinc ion. TALENs comprise DBDs selected or designed based on DBDs of transcription activator-like (TAL) effectors (TALEs) of Xanthomonas spp. ZFN or TALEN dimers induce targeted DNA DSBs that stimulate DNA damage response pathways. The binding specificity of the designed zinc-finger domain directs the ZFN to a specific genomic site. TALEs contain multiple 33-35-amino-acid repeat domains, each of which recognizes a single base pair. Like ZFNs, TALENs induce targeted DSBs that activate DNA damage response pathways and enable custom alterations. The DNA cleavage domain of an engineered site-specific nuclease may comprise a catalytic domain from a naturally occurring endonuclease such as the Fok1 endonuclease or a variant thereof. In some embodiments Fok1 cleavage domain variants with mutations designed to improve cleavage specificity and/or cleavage activity may be used (see, e.g., Guo, J., et al. (2010) Journal of Molecular Biology 400 (1): 96-107; Doyon, Y., et al., (2011) Nature Methods 8: 74-79. Meganucleases are sequence-specific endonucleases characterized by a large recognition site (double-stranded DNA sequences of 12 to about 40 base pairs). The site generally occurs no more than once in a given genome. The specificity of a meganuclease can be changed by introducing changes sequence of the nuclease (e.g., in the DNA binding domain) and then selecting functional enzymes capable of cleaving variants of the natural recognition site or by associating or fusing protein domains from different nucleases.

[0564] In some embodiments, an RNA directed nuclease may be used to perform genome editing. For example, the use of CRISPR/Cas-based systems is contemplated. In some embodiments a Cas nuclease, such as Cas9 (e.g., Cas9 of Streptococcus pyogenes, Streptococcus thermophiles, or Neisseria meningitides, or a variant thereof), is introduced into cells along with a guide RNA comprising a sequence complementary to a sequence of interest (the RNA is sometimes termed a single guide RNA). The region of complementarity may be, e.g., about 20 nucleotides long. The Cas nuclease, e.g., Cas9, is guided to a particular DNA sequence of interest by the guide RNA. The guide RNA may be engineered to have complementarity to a target sequence of interest in the genome, e.g., a sequence in any gene or intergenic region of interest. The nuclease activity of the Cas protein, e.g., Cas9, cleaves the DNA, which can disable the gene, or cut it apart, allowing a different DNA sequence to be inserted. In some embodiments multiple sgRNAs comprising sequences complementary to different genes, e.g., 2, 3, 4, 5, or more genes, are introduced into the same cell sequentially or together. In some embodiments alterations in multiple genes may thereby be generated in the same step.

[0565] In general, use of nuclease-based systems for genetic engineering, e.g., genome editing, entails introducing a nuclease into cells and maintaining the cells under conditions and for a time appropriate for the nuclease to cleave the cell's DNA. In the case of

[0566] CRISP/Cas systems, a guide RNA is also introduced. The nuclease is typically introduced into the cell by introducing a nucleic acid encoding the nuclease. The nucleic acid may be operably linked to a promoter capable of directing expression in the cell and may be introduced into the cell in a plasmid or other vector. In some embodiments mRNA encoding the nuclease may be introduced. In some embodiments the nuclease itself may be introduced. sgRNA may be introduced directly (by methods such as transfection) or by expressing it from a nucleic acid construct such as an expression vector. In some embodiments a sgRNA and Cas protein are expressed from a single expression vector that has been introduced into the cell or, in some embodiments, from different expression vectors. In some embodiments multiple sgRNAs comprising sequences complementary to different genes, e.g., 2, 3, 4, 5, or more genes, are introduced into the same cell individually or together as RNA or by introducing one or more nucleic acid constructs encoding the sgRNAs into the cell for intracellular transcription.

[0567] Upon cleavage by a nuclease, a target locus (e.g., in the genome of a cell) may undergo one of two major pathways for DNA damage repair, namely non-homologous end joining (NHEJ) or homology-directed repair (HDR). In the absence of a suitable repair template comprising sufficient homology to the sequences flanking the cleavage site to stimulate HDR (see discussion below), DSBs are re-ligated through NHEJ, which can result in an insertion or deletion. NHEJ can be used, for example, to engineer gene knockouts or generate proteins with altered activity. For example, an insertion or deletion in an exon can lead to a frameshift mutation or premature stop codon. Two or more DSBs can be generated in order to produce larger deletions in the genome.

[0568] In some embodiments a nucleic acid (e.g., a plasmid or linear DNA) comprising a sequence of interest to be inserted into the genome at the location of cleavage is introduced into a cell in addition to a nuclease. In some embodiments a sequence of interest is inserted into a gene. The sequence of interest may at least in part replace the gene. In some embodiments the nucleic acid comprises sequences that are homologous to the sequences flanking the cleavage site, so that homology-directed repair is stimulated. In some embodiments the nucleic acid contains a desired alteration as compared to a sequence present in the cell's genome at or near the site of cleavage. A nucleic acid comprising a sequence to be at least in part introduced into the genome, e.g., a nucleic acid sequence comprising homologous sequence(s) and a desired alteration may be referred to as a “donor sequence”. The donor sequence may become at least in part physically into integrated the genome at the site of a break or may be used as a template for repair of the break, resulting in the introduction of all or part of the nucleotide sequence present in the donor into the genome of the cell. Thus, a sequence in a cell's genome can be altered and, in certain embodiments, can be converted into a sequence present in a donor nucleic acid. In some embodiments the donor sequence may be contained in a circular DNA (e.g. a plasmid), a linear double-stranded DNA (e.g., a linearized plasmid or a PCR product), or single-stranded DNA, e.g., a single-stranded oligonucleotide. In some embodiments the donor sequence has between about 10-25 bp and about 50-100 bp of homology to either side or each side of the target site in the genome. In some embodiments a longer homologous sequence may be used, e.g., between about 100-500 bp up to about 1-2 kB, or more. In some embodiments an alteration is introduced into one allele of a gene. In some embodiments a first alteration is introduced into one allele of a gene, and a different alteration is introduced into the other allele. In some embodiments the same alteration is introduced into both alleles. In some embodiments two alleles or target sites (or more) may be genetically modified in a single step. In some embodiments two alleles or target sites (or more) may be genetically modified in separate steps.

[0569] Methods of designing, generating and using ZFNs and/or TALENs are described in, e.g., WO2011097036; Urnov, F D, et al., Nature Reviews Genetics (2010), 11: 636-646; Miller J C, et al., Nat Biotechnol. (2011) 29(2): 143-8; Cermak, T., et al. Nucleic Acids Research (2011) 39 (12): e82, Sanjana, N. E. et al. A transcription activator-like effector toolbox for genome engineering. Nat Protoc 7, 171-192 (2012) and references in any of the foregoing. ZFN, TALEN, and CRISPR/Cas-based methods for genome engineering are reviewed in Gaj, T., et al., Trends Biotechnol. 2013 July; 31(7):397-405. Epub 2013 May 9. Use of CRISPR/Cas systems in genome engineering is described in, e.g., Cong L, et al. Multiplex genome engineering using CRISPR/Cas systems. Science. 2013; 339(6121):819-23; Mali P, et al., RNA-guided human genome engineering via Cas9. Science. 2013; 339(6121):823-6; Wang, H. et al. One-step generation of mice carrying mutations in multiple genes by CRISPR/Cas-mediated genome engineering. Cell 153, 910-918 (2013); Ran, F. A. et al. Double Nicking by RNA-Guided CRISPR Cas9 for Enhanced Genome Editing Specificity. Cell 154, 1380-1389 (2013); Mali, P., et al., Nat Methods. 2013; 10(10):957-63; Ran, F A, Nat Protoc. 2013; 8(11):2281-308). In some embodiments a nuclease that cleaves only one strand of dsDNA (a nickase) may be used to stimulate HDR without activating the NHEJ repair pathway. Nickases may be created by inactivating the catalytic activity of one nuclease monomer in the ZFN or TALEN dimer required for double stranded cleavage or inactivating a catalytic domain of a Cas protein. For example, mutations of one of the catalytic residues (D10 in the RuvC nuclease domain and H840 in the HNH nuclease domain), e.g., to alanines (D10A, H840A) convert Cas9 into DNA nickases.

[0570] In some embodiments, a CRISP/Cas based system may be used to modulate gene expression. For example, coexpression of a guide RNA with a catalytically inactive Cas9 lacking endonuclease activity generates a DNA recognition complex that can specifically interfere with transcriptional elongation, RNA polymerase binding, or transcription factor binding. This system, sometimes referred to CRISPR interference (CRISPRi), can efficiently repress expression of targeted genes in mammalian cells (Qi, S., et al., Cell, 2013; 152(5): 1173-83; Larson, M H, et al, Nat Protoc. 2013; 8(11):2180-96). By attaching any of a variety of effector domains to a catalytically inactive Cas9 one can create a chimeric Cas9 protein that can be used to achieve sequence-specific control over gene expression and/or DNA modification. Suitable effector domains include, e.g., a transcriptional activation domain (such as those comprising the VP16 transactivation domain, e.g., VP64), a transcriptional coactivation domain, a transcriptional inhibitory or co-inhibitory domain, a protein-protein interaction domain, an enzymatic domain, etc. A guide RNA guides the chimeric Cas9 protein to a site of interest in the genome (e.g., in or near an expression control element such as a promoter), whereby the effector domain exerts an effect such as activating or inhibiting transcriptional activity (see, e.g., Gilbert L A, et al. Cell. 2013; 154(2):442-51; Maeder M L, et al., Nat Methods, 2013; 10(10):977-9), Appropriate effector domains may be any of those present in naturally occurring proteins that are capable of performing the function of interest (e.g., inhibiting or activating transcription).

[0571] Cells that have been subjected to a genetic engineering process may be selected or analyzed to identify or isolate those that express a desired recombinant gene product or lack expression of an endogenous gene that has been disabled via genetic engineering or have any desired genetic alteration. For example, in some embodiments the donor sequence or vector used to deliver the donor sequence may comprise a selectable marker, which may be used to select cells that have incorporated at least a portion of the donor sequence comprising the selectable marker into their genome. In some embodiments selection is not used. In some embodiments cells may be screened, e.g., by Southern blot to identify those cells or clones that have a desired genetic alteration. If desired, cells may be tested for expression level or activity of a recombinant gene product or endogenous gene product or for one or more functional properties associated with or conferred by a recombinant or endogenous gene product, or any other criteria of interest. Suitable methods of analysis are known to those of ordinary skill in the art and include, e.g., Western blot, flow cytometry, FAGS, immunofluorescence microscopy, ELISA assays, affinity-based methods in which cells are contacted with an agent capable of binding to a protein of interest that labels or retains cells that express the protein, etc. Functional assays may be selected based on the identity of the recombinant gene product, endogenous gene product, and/or function or property of interest. For example, a functional property may be ability to bind to an antigen of interest or ability to exert cytotoxicity towards target cells that express an antigen of interest. Cells may be analyzed, e.g., by PGR, Southern blotting, or sequencing, to determine the number of inserted DNA sequences, their location, and/or to determine whether desired genomic alterations have occurred. One or more cells that have desired alteration(s), expression level, and/or functional properties may be identified, propagated, expanded. The cells or their descendants may be used to generate a cell line, subjected to sortagging, and/or stored for future use.

### Populations of Engineered Erythroid Cells

[0572] In one aspect, the invention features cell populations comprising the engineered erythroid cells of the invention, e.g., a plurality or population of the engineered erythroid cells. In various embodiments, the engineered erythroid cell population comprises predominantly enucleated cells, predominantly nucleated cells, or a mixture of enucleated and nucleated cells. In such cell populations, the enucleated cells can comprise reticulocytes, erythrocytes, or a mixture of reticulocytes and erythrocytes. In some embodiments, the enucleated cells are reticulocytes. In some embodiments, the enucleated cells are erythrocytes.

[0573] In some embodiments, the engineered erythroid cell population consists essentially of enucleated cells. In some embodiments, the engineered erythroid cell population comprises predominantly or substantially enucleated cells. For example, In some embodiments, the population of engineered erythroid cells comprises at least about 80% or more enucleated cells. In some embodiments, the population provided herein comprises at least about 80%, about 81%, about 82%, about 83%, about 84%, about 85%, about 86%, about 87%, about 88%, about 89%, about 90%, about 91%, about 92%, about 93%, about 94%, about 95%, about 96%, about 97%, about 98%, about 99, or about 100% enucleated cells. In some embodiments, the population provided herein comprises greater than about 80% enucleated cells. In some embodiments, the population of engineered erythroid cells comprises greater than about 80%, about 81%, about 82%, about 83%, about 84%, about 85%, about 86%, about 87%, about 88%, about 89%, about 90%, about 91%, about 92%, about 93%, about 94%, about 95%, about 96%, about 97%, about 98%, or about 99% enucleated cells. In some embodiments, the population of engineered erythroid cells comprises between about 80% and about 100% enucleated cells, for example between about 80% and about 95%, about 80% and about 90%, about 80% and about 85%, about 85% and about 100%, about 85% and about 95%, about 85% and about 90%, about 90% and about 100%, about 90% and about 95%, or about 95% and about 100% of enucleated cells.

[0574] In some embodiments, the population of engineered erythroid cells comprises less than about 20% nucleated cells. For example, in embodiments, the population of engineered erythroid cells comprises less than about 1%, about 2%, about 3%, about 5%, about 6%, about 7%, about 8%, about 9%, about 10%, about 11%, about 12%, about 13%, about 14%, about 15%, about 16%, about 17%, about 18%, about 19%, or less than about 20% nucleated cells. In some embodiments, the population of engineered erythroid cells comprises less than about 1% nucleated cells. In some embodiments, the population of engineered erythroid cells comprises less than about 2% nucleated cells. In some embodiments, the population of engineered erythroid cells comprises less than about 3% nucleated cells. In some embodiments, the population of engineered erythroid cells comprises less than about 4% nucleated cells. In some embodiments, the population of engineered erythroid cells comprises less than about 5% nucleated cells. In some embodiments, the population of engineered erythroid cells comprises less than about 10% nucleated cells. In some embodiments, the population of engineered erythroid cells comprises less than about 15% nucleated cells. In some embodiments, the population of engineered erythroid cells comprises between 0% and 20% nucleated cells. In some embodiments, the populations of engineered erythroid cells comprise between about 0% and 20% nucleated cells, for example between about 0% and 19%, between about 0% and 15%, between about 0% and 10%, between about 0% and 5%, between about 0% and 4%, between about 0% and 3%, between about 0% and 2% nucleated cells, or between about 5% and 20%, between about 10% and 20%, or between about 15% and 20% nucleated cells.

[0575] In some embodiments, the disclosure features a population of the engineered erythroid cells of the invention, wherein the population of engineered erythroid cells comprises less than 20% nucleated cells and at least 80% enucleated cells, or comprises less than 15% nucleated cells and at least 85% nucleated cells, or comprises less than 10% nucleated cells and at least 90% enucleated cells, or comprises less than 5% nucleated cells and at least 95% enucleated cells. In some embodiments, the disclosure features populations of the engineered erythroid cells of the invention, wherein the population of engineered erythroid cells comprises about 0% nucleated cells and about 100% enucleated cells, about 1% nucleated cells and about 99% enucleated cells, about 2% nucleated cells and about 98% enucleated cells, about 3% nucleated cells and about 97% enucleated cells, about 4% nucleated cells and about 96% enucleated cells, about 5% nucleated cells and about 95% enucleated cells, about 6% nucleated cells and about 94% enucleated cells, about 7% nucleated cells and about 93% enucleated cells, about 8% nucleated cells and about 92% enucleated cells, about 9% nucleated cells and about 91% enucleated cells, about 10% nucleated cells and about 90% enucleated cells, about 11% nucleated cells and about 89% enucleated cells, about 12% nucleated cells and about 88% enucleated cells, about 13% nucleated cells and about 87% enucleated cells, about 14% nucleated cells and about 86% enucleated cells, about 85% nucleated cells and about 85% enucleated cells, about 16% nucleated cells and about 84% enucleated cells, about 17% nucleated cells and about 83% enucleated cells, about 18% nucleated cells and about 82% enucleated cells, about 19% nucleated cells and about 81% enucleated cells, or about 20% nucleated cells and about 80% enucleated cells.

[0576] In another embodiment, the engineered erythroid cell population comprises predominantly or substantially nucleated cells. In some embodiments, the engineered erythroid cell population consists essentially of nucleated cells. In various embodiments, the nucleated cells in the engineered erythroid cell population are erythrocyte (or fully mature red blood cell) precursor cells. In embodiments, the erythrocyte precursor cells are selected from the group consisting of pluripotent hematopoietic stem cells (HSCs), multipotent myeloid progenitor cells, CFU-S cells, BFU-E cells, CFU-E cells, pronormoblasts, basophilic normoblasts, polychromatophilic normoblasts and orthochromatophilic normoblasts.

[0577] In some embodiments, the erythrocyte precursor cells, e.g., hematopoietic stem cells, are from an O-negative donor.

[0578] In certain embodiments, the population of engineered erythroid cells comprises at least about 10%, at least about 20%, at least about 30%, at least about 40%, at least about 50%, at least about 60%, at least about 70%, at least about 75%, at least about 80%, at least about 85%, at least about 90%, at least about 95%, at least about 98%, at least about 99% or 100% nucleated cells.

[0579] It will be understood that during the preparation of the engineered erythroid cells of the invention, some fraction of cells may not become conjugated with an exogenous polypeptide or transduced to express an exogenous polypeptide. Accordingly, in some embodiments, a population of engineered erythroid cells provided herein comprises a mixture of engineered erythroid cells and unmodified erythroid cells, i.e., some fraction of cells in the population will not comprise, present, or express an exogenous polypeptide. For example, a population of engineered erythroid cells can comprise, in various embodiments, at least about 10%, 20%, 30%, 40%, 50%, 60%, 70%, 80%, 90%, 91%, 92%, 93%, 94%, 95%, 96%, 97%, 98% or 99% engineered erythroid cells, wherein the remaining erythroid cells in the population are not engineered. In embodiments, a single unit dose of engineered erythroid cells can comprise, in various embodiments, at least about 10%, 20%, 30%, 40%, 50%, 60%, 70%, 80%, 90%, 91%, 92%, 93%, 94%, 95%, 96%, 97%, 98% or 99% engineered erythroid cells, wherein the remaining erythroid cells in the dose are not engineered.

### III. Methods of Making Artificial Antigen Presenting Cells

[0580] Various methods of making aAPCs are contemplated by the present disclosure.

[0581] Methods of manufacturing enucleated erythroid cells comprising an exogenous agent (e.g., a polypeptide) are described, e.g., in International Application Publication Nos. WO2015/073587 and WO2015/153102, each of which is incorporated by reference in its entirety.

[0582] In some embodiments, hematopoietic progenitor cells, e.g., CD34⁺ hematopoietic progenitor cells (e.g., human (e.g., adult human) or mouse cells), are contacted with a nucleic acid or nucleic acids encoding one or more exogenous polypeptides, and the cells are allowed to expand and differentiate in culture. In some embodiments, the CD34⁺ cells are immortalized, e.g., comprise a human papilloma virus (HPV; e.g., HPV type 16) E6 and/or E7 genes. In some embodiments, the immortalized CD34⁺ hematopoietic progenitor cell is a BEL-A cell line cell (see Trakarnasanga et al. (2017) Nat. Commun. 8: 14750). Additional immortalized CD34⁺ hematopoietic progenitor cells are described in U.S. Pat. Nos. 9,951,350, and 8,975,072. In some embodiments, an immortalized CD34⁺ hematopoietic progenitor cell is contacted with a nucleic acid or nucleic acids encoding one or more exogenous polypeptides, and the cells are allowed to expand and differentiate in culture.

[0583] In one aspect, the present disclosure features a method of making an immunologically compatible artificial antigen presenting cell (aAPC), wherein the aAPC comprises an erythroid cell or enucleated cell that presents, e.g. comprises on the cell surface, an exogenous antigenic polypeptide, the method comprising contacting a nucleated cell with a nuclease and at least one gRNA which cleave an endogenous nucleic acid to result in expression of an endogenous antigen-presenting polypeptide, an endogenous anchor polypeptide, or an endogenous costimulatory polypeptide; or to result in inhibition of expression of an endogenous microRNA; introducing an exogenous nucleic acid encoding the exogenous antigenic polypeptide into the nucleated cell; and culturing the nucleated cell under conditions suitable for expression and presentation of the exogenous antigenic polypeptide by the endogenous antigen-presenting polypeptide, and enucleation, thereby making an enucleated cell, thereby making the immunologically compatible aAPC. Methods of making an aAPC are described herein, however it is to be understood that these methods are non-limiting.

### Physical Characteristics of Engineered Erythroid Cells

[0584] In some embodiments, the erythroid cells described herein have one or more (e.g., 2, 3, 4, or more) physical characteristics described herein, e.g., osmotic fragility, cell size, hemoglobin concentration, or phosphatidylserine content. While not wishing to be bound by theory, in some embodiments an engineered erythroid cell that expresses an exogenous protein has physical characteristics that resemble a wild-type, untreated erythroid cell. In contrast, a hypotonically loaded erythroid cell sometimes displays aberrant physical characteristics such as increased osmotic fragility, altered cell size, reduced hemoglobin concentration, or increased phosphatidylserine levels on the outer leaflet of the cell membrane.

[0585] In some embodiments, the engineered erythroid cell, e.g. enucleated cell, comprises an exogenous protein that was encoded by an exogenous nucleic acid that was not retained by the cell, has not been purified, or has not existed fully outside an erythroid cell. In some embodiments, the erythroid cell is in a composition that lacks a stabilizer.

### Osmotic Fragility

[0586] In some embodiments, the engineered erythroid cell, e.g. enucleated cell, exhibits substantially the same osmotic membrane fragility as an isolated, uncultured erythroid cell that does not comprise an exogenous polypeptide. In some embodiments, the population of engineered erythroid cells has an osmotic fragility of less than 50% cell lysis at 0.3%, 0.35%, 0.4%, 0.45%, or 0.5% NaCl. Osmotic fragility can be assayed using the method of Example 59 of WO2015/073587, which is herein incorporated by reference in its entirety.

### Cell Size

[0587] In some embodiments, the engineered erythroid cell, e.g. enucleated cell, has approximately the diameter or volume as a wild-type, untreated erythroid cell. In some embodiments, the population of erythroid cells has an average diameter of about 4, 5, 6, 7, or 8 microns, and optionally the standard deviation of the population is less than 1, 2, or 3 microns. In some embodiments, the one or more erythroid cell has a diameter of about 4-8, 5-7, or about 6 microns. In some embodiments, the diameter of the erythroid cell is less than about 1 micron, larger than about 20 microns, between about 1 micron and about 20 microns, between about 2 microns and about 20 microns, between about 3 microns and about 20 microns, between about 4 microns and about 20 microns, between about 5 microns and about 20 microns, between about 6 microns and about 20 microns, between about 5 microns and about 15 microns or between about 10 microns and about 30 microns. Cell diameter is measured, in some embodiments, using an Advia 120 hematology system.

[0588] In some embodiment the volume of the mean corpuscular volume of the erythroid cells is greater than 10 fL, 20 fL, 30 fL, 40 fL, 50 fL, 60 fL, 70 fL, 80 fL, 90 fL, 100 fL, 110 fL, 120 fL, 130 fL, 140 fL, 150 fL, or greater than 150 fL. In some embodiments the mean corpuscular volume of the erythroid cells is less than 30 fL, 40 fL, 50 fL, 60 fL, 70 fL, 80 fL, 90 fL, 100 fL, 110 fL, 120 fL, 130 fL, 140 fL, 150 fL, 160 fL, 170 fL, 180 fL, 190 fL, 200 fL, or less than 200 fL. In some embodiments the mean corpuscular volume of the erythroid cells is between 80-100, 100-200, 200-300, 300-400, or 400-500 femtoliters (fL). In some embodiments, a population of erythroid cells has a mean corpuscular volume set out in this paragraph and the standard deviation of the population is less than 50, 40, 30, 20, 10, 5, or 2 fL. The mean corpuscular volume is measured, in some embodiments, using a hematological analysis instrument, e.g., a Coulter counter.

[0589] Hemoglobin Concentration

[0590] In some embodiments, the engineered erythroid cell, e.g. enucleated cell, has a hemoglobin content similar to a wild-type, untreated erythroid cell. In some embodiments, the erythroid cells comprise greater than 1%, 2%, 3%, 4%, 5%, 6%, 7%, 8%, 9% or greater than 10% fetal hemoglobin. In some embodiments, the erythroid cells comprise at least about 20, 22, 24, 26, 28, or 30 pg, and optionally up to about 30 pg, of total hemoglobin. Hemoglobin levels are determined, in some embodiments, using the Drabkin's reagent method of Example 33 of WO2015/073587, which is herein incorporated by reference in its entirety.

[0591] Phosphatidylserine Content

[0592] In some embodiments, the engineered erythroid cell, e.g. artificial antigen presenting cells as described herein or the enucleated cell, has approximately the same phosphatidylserine content on the outer leaflet of its cell membrane as a wild-type, untreated erythroid cell. Phosphatidylserine is predominantly on the inner leaflet of the cell membrane of wild-type, untreated erythroid cells, and hypotonic loading can cause the phosphatidylserine to distribute to the outer leaflet where it can trigger an immune response. In some embodiments, the population of engineered erythroid cells (e.g. artificial antigen presenting cells as described herein) or enucleated cells comprises less than about 30, 25, 20, 15, 10, 9, 8, 6, 5, 4, 3, 2, or 1% of cells that are positive for Annexin V staining. Phosphatidylserine exposure is assessed, in some embodiments, by staining for Annexin-V-FITC, which binds preferentially to PS, and measuring FITC fluorescence by flow cytometry, e.g., using the method of Example 54 of WO2015/073587, which is herein incorporated by reference in its entirety.

[0593] Other Characteristics

[0594] In some embodiments, an engineered erythroid cell (e.g., engineered enucleated erythroid cell) or an engineered enucleated cell, or a population of engineered erythroid cells or engineered enucleated cells comprises one or more of (e.g., all of) endogenous GPA (C235a), transferrin receptor (CD71), Band 3 (CD233), or integrin alpha4 (C49d). These proteins can be measured, e.g., as described in Example 10 of International Application Publication No. WO2018/009838, which is herein incorporated by reference in its entirety. The percentage of GPA-positive cells and Band 3-positive cells typically increases during maturation of an erythroid cell, and the percentage of integrin alpha4-positive typically remains high throughout maturation.

[0595] In some embodiments, the population of erythroid cells comprises at least about 50%, 60%, 70%, 80%, 90%, or 95% (and optionally up to 90 or 100%) of cells that are positive for GPA. The presence of GPA is detected, in some embodiments, using FACS.

[0596] In some embodiments, the population of engineered erythroid cells (engineered enucleated erythroid cells) or engineered enucleated cells comprises at least about 50%, 60%, 61%, 62%, 63%, 64%, 65%, 66%, 67%, 68%, 69%, 70%, 71%, 72%, 73%, 74%, 75%, 76%, 77%, 78%, 79%, 80%, 81%, 82%, 83%, 84%, 85%, 86%, 87%, 88%, 89%, 90%, 91%, 92%, 93%, 94%, 95%, 96%, 97%, 98%, 99%, or 100% GPA⁺ (i.e., CD235a⁺) cells. In some embodiments, the population of engineered erythroid cells (engineered enucleated erythroid cells) or engineered enucleated cells comprises between about 50% and about 100% (e.g., from about 60% and about 100%, from about 65% and about 100%, from about 70% and about 100%, from about 75% to about 100%, from about 80% to about 100%, from about 85% to about 100%, from about 90% to about 100%, from about 95% to about 100%, from about 75% to about 99%, from about 80% to about 99%, from about 85% to about 99%, from about 90% to about 99%, from about 95% to about 99%, from about 75% to about 95%, from about 80% to about 95%, from about 85% to about 95%, from about 90% to about 95%, from about 95% to about 98%) GPA⁺ cells. The presence of GPA is detected, in some embodiments, using FACS.

[0597] In some embodiments, the population of engineered erythroid cells (engineered enucleated erythroid cells) or engineered enucleated cells comprises at least about 50%, 60%, 61%, 62%, 63%, 64%, 65%, 66%, 67%, 68%, 69%, 70%, 71%, 72%, 73%, 74%, 75%, 76%, 77%, 78%, 79%, 80%, 81%, 82%, 83%, 84%, 85%, 86%, 87%, 88%, 89%, 90%, 91%, 92%, 93%, 94%, 95%, 96%, 97%, 98%, 99%, or 100% CD71⁺ cells. In some embodiments, the population of engineered erythroid cells (engineered enucleated erythroid cells) or engineered enucleated cells comprises between about 70% and about 100% (e.g., from about 75% to about 100%, from about 80% to about 100%, from about 85% to about 100%, from about 90% to about 100%, from about 95% to about 100%, from about 75% to about 99%, from about 80% to about 99%, from about 85% to about 99%, from about 90% to about 99%, from about 95% to about 99%, from about 75% to about 95%, from about 80% to about 95%, from about 85% to about 95%, from about 90% to about 95%, from about 95% to about 98%) CD71⁺ cells. The presence of CD71 (transferrin receptor) is detected, in some embodiments, using FACS.

[0598] In some embodiments, the population of engineered erythroid cells (engineered enucleated erythroid cells) or engineered enucleated cells comprises at least about 50%, 60%, 61%, 62%, 63%, 64%, 65%, 66%, 67%, 68%, 69%, 70%, 71%, 72%, 73%, 74%, 75%, 76%, 77%, 78%, 79%, 80%, 81%, 82%, 83%, 84%, 85%, 86%, 87%, 88%, 89%, 90%, 91%, 92%, 93%, 94%, 95%, 96%, 97%, 98%, 99%, or 100% CD233⁺ cells. In some embodiments, the population of engineered erythroid cells (engineered enucleated erythroid cells) or engineered enucleated cells comprises between about 70% and about 100% (e.g., from about 75% to about 100%, from about 80% to about 100%, from about 85% to about 100%, from about 90% to about 100%, from about 95% to about 100%, from about 75% to about 99%, from about 80% to about 99%, from about 85% to about 99%, from about 90% to about 99%, from about 95% to about 99%, from about 75% to about 95%, from about 80% to about 95%, from about 85% to about 95%, from about 90% to about 95%, from about 95% to about 98%) CD233⁺ cells. The presence of CD233 (Band 3) is detected, in some embodiments, using FACS.

[0599] In some embodiments, the population of engineered erythroid cells (engineered enucleated erythroid cells) or engineered enucleated cells comprises at least about 50%, 60%, 61%, 62%, 63%, 64%, 65%, 66%, 67%, 68%, 69%, 70%, 71%, 72%, 73%, 74%, 75%, 76%, 77%, 78%, 79%, 80%, 81%, 82%, 83%, 84%, 85%, 86%, 87%, 88%, 89%, 90%, 91%, 92%, 93%, 94%, 95%, 96%, 97%, 98%, 99%, or 100% CD47⁺ cells. In some embodiments, the population of engineered erythroid cells (engineered enucleated erythroid cells) or engineered enucleated cells comprises between about 70% and about 100% (e.g., from about 75% to about 100%, from about 80% to about 100%, from about 85% to about 100%, from about 90% to about 100%, from about 95% to about 100%, from about 75% to about 99%, from about 80% to about 99%, from about 85% to about 99%, from about 90% to about 99%, from about 95% to about 99%, from about 75% to about 95%, from about 80% to about 95%, from about 85% to about 95%, from about 90% to about 95%, from about 95% to about 98%) CD47⁺ cells. The presence of CD47 (integrin associate protein) is detected, in some embodiments, using FACS.

[0600] In some embodiments, the population of engineered erythroid cells (engineered enucleated erythroid cells) or engineered enucleated cells comprises at least about 50%, 60%, 61%, 62%, 63%, 64%, 65%, 66%, 67%, 68%, 69%, 70%, 71%, 72%, 73%, 74%, 75%, 76%, 77%, 78%, 79%, 80%, 81%, 82%, 83%, 84%, 85%, 86%, 87%, 88%, 89%, 90%, 91%, 92%, 93%, 94%, 95%, 96%, 97%, 98%, 99%, or 100% CD36⁻ (CD36-negative) cells. In some embodiments, the population of engineered erythroid cells (engineered enucleated erythroid cells) or engineered enucleated cells comprises between about 70% and about 100% (e.g., from about 75% to about 100%, from about 80% to about 100%, from about 85% to about 100%, from about 90% to about 100%, from about 95% to about 100%, from about 75% to about 99%, from about 80% to about 99%, from about 85% to about 99%, from about 90% to about 99%, from about 95% to about 99%, from about 75% to about 95%, from about 80% to about 95%, from about 85% to about 95%, from about 90% to about 95%, from about 95% to about 98%) CD36⁻ (CD36-negative) cells. The presence of CD36 is detected, in some embodiments, using FACS.

[0601] In some embodiments, the population of engineered erythroid cells (engineered enucleated erythroid cells) or engineered enucleated cells comprises at least about 50%, 60%, 61%, 62%, 63%, 64%, 65%, 66%, 67%, 68%, 69%, 70%, 71%, 72%, 73%, 74%, 75%, 76%, 77%, 78%, 79%, 80%, 81%, 82%, 83%, 84%, 85%, 86%, 87%, 88%, 89%, 90%, 91%, 92%, 93%, 94%, 95%, 96%, 97%, 98%, 99%, or 100% CD34⁻ (CD34-negative) cells. In some embodiments, the population of engineered erythroid cells (engineered enucleated erythroid cells) or engineered enucleated cells comprises between about 70% and about 100% (e.g., from about 75% to about 100%, from about 80% to about 100%, from about 85% to about 100%, from about 90% to about 100%, from about 95% to about 100%, from about 75% to about 99%, from about 80% to about 99%, from about 85% to about 99%, from about 90% to about 99%, from about 95% to about 99%, from about 75% to about 95%, from about 80% to about 95%, from about 85% to about 95%, from about 90% to about 95%, from about 95% to about 98%) CD34⁻ (CD34-negative) cells. The presence of CD34 is detected, in some embodiments, using FACS.

[0602] In some embodiments, the population of engineered erythroid cells (engineered enucleated erythroid cells) or engineered enucleated cells comprises at least about 50%, 60%, 61%, 62%, 63%, 64%, 65%, 66%, 67%, 68%, 69%, 70%, 71%, 72%, 73%, 74%, 75%, 76%, 77%, 78%, 79%, 80%, 81%, 82%, 83%, 84%, 85%, 86%, 87%, 88%, 89%, 90%, 91%, 92%, 93%, 94%, 95%, 96%, 97%, 98%, 99%, or 100% CD235a⁺/CD47⁺/CD233⁺ cells. In some embodiments, the population of engineered erythroid cells (engineered enucleated erythroid cells) or engineered enucleated cells comprises between about 70% and about 100% (e.g., from about 75% to about 100%, from about 80% to about 100%, from about 85% to about 100%, from about 90% to about 100%, from about 95% to about 100%, from about 75% to about 99%, from about 80% to about 99%, from about 85% to about 99%, from about 90% to about 99%, from about 95% to about 99%, from about 75% to about 95%, from about 80% to about 95%, from about 85% to about 95%, from about 90% to about 95%, from about 95% to about 98%) CD235a⁺/CD47⁺/CD233⁺ cells.

[0603] In some embodiments, the population of engineered erythroid cells (engineered enucleated erythroid cells) or engineered enucleated cells comprises at least about 50%, 60%, 61%, 62%, 63%, 64%, 65%, 66%, 67%, 68%, 69%, 70%, 71%, 72%, 73%, 74%, 75%, 76%, 77%, 78%, 79%, 80%, 81%, 82%, 83%, 84%, 85%, 86%, 87%, 88%, 89%, 90%, 91%, 92%, 93%, 94%, 95%, 96%, 97%, 98%, 99%, or 100% CD235a⁺/CD47⁺/CD233⁺/CD347CD36⁻ cells. In some embodiments, the population of engineered erythroid cells (engineered enucleated erythroid cells) or engineered enucleated cells comprises between about 70% and about 100% (e.g., from about 75% to about 100%, from about 80% to about 100%, from about 85% to about 100%, from about 90% to about 100%, from about 95% to about 100%, from about 75% to about 99%, from about 80% to about 99%, from about 85% to about 99%, from about 90% to about 99%, from about 95% to about 99%, from about 75% to about 95%, from about 80% to about 95%, from about 85% to about 95%, from about 90% to about 95%, from about 95% to about 98%) CD235a⁺/CD47⁺/CD233⁺/CD347CD36⁻ cells.

[0604] In some embodiments, a population of engineered erythroid cells (engineered enucleated erythroid cells) or engineered enucleated cells comprising erythroid cells comprises less than about 10%, 9%, 8%, 7%, 6%, 5%, 4%, 3%, 2%, or 1% echinocytes.

[0605] In some embodiments, a population of engineered erythroid cells (e.g. artificial antigen presenting cells as described herein) comprising erythroid cells comprises less than about 10%, 9%, 8%, 7%, 6%, 5%, 4%, 3%, 2%, or 1% echinocytes.

[0606] In some embodiments, a population of engineered erythroid cells (engineered enucleated erythroid cells) or engineered enucleated cells comprises less than about 10%, 9%, 8%, 7%, 6%, 5%, 4%, 3%, 2%, or 1% pyrenocytes.

[0607] In some embodiments, an erythroid cell is enucleated, e.g., a population of cells comprising erythroid cells used as a therapeutic preparation described herein is greater than 50%, 60%, 70%, 80%, 90% enucleated. In some embodiments, a cell, e.g., an erythroid cell, contains a nucleus that is non-functional, e.g., has been inactivated. In some embodiments, the engineered erythroid cell is an enucleated cell. In some embodiments, the engineered erythroid cell is a nucleated cell.

### Isolating Erythrocytes

[0608] Mature erythrocytes may be isolated using various methods such as, for example, a cell washer, a continuous flow cell separator, density gradient separation, fluorescence-activated cell sorting (FACS), Miltenyi immunomagnetic depletion (MACS), or a combination of these methods (See, e.g., van der Berg et al., Clin. Chem. 33:1081-1082 (1987); Bar-Zvi et al., J. Biol. Chem. 262:17719-17723 (1987); Goodman et al., Exp. Biol. Med. 232:1470-1476 (2007)).

[0609] Erythrocytes may be isolated from whole blood by simple centrifugation (See, e.g., van der Berg et al., Clin. Chem. 33:1081-1082 (1987)). For example, EDTA-anticoagulated whole blood may be centrifuged at 800×g for 10 min at 4° C. The platelet-rich plasma and buffy coat are removed and the red blood cells are washed three times with isotonic saline solution (NaCl, 9 g/L).

[0610] Alternatively, erythrocytes may be isolated using density gradient centrifugation with various separation mediums such as, for example, Ficoll, Hypaque, Histopaque, Percoll, Sigmacell, or combinations thereof. For example, a volume of Histopaque-1077 is layered on top of an equal volume of Histopaque-1119. EDTA-anticoagulated whole blood diluted 1:1 in an equal volume of isotonic saline solution (NaCl, 9 g/L) is layered on top of the Histopaque and the sample is centrifuged at 700×g for 30 min at room temperature. Under these conditions, granulocytes migrate to the 1077/1119 interface, lymphocytes, other mononuclear cells and platelets remain at the plasma/1077 interface, and the red blood cells are pelleted. The red blood cells are washed twice with isotonic saline solution.

[0611] Alternatively, erythrocytes may be isolated by centrifugation using a Percoll step gradient (See, e.g., Bar-Zvi et al., J. Biol. Chem. 262:17719-17723 (1987)). For example, fresh blood is mixed with an anticoagulant solution containing 75 mM sodium citrate and 38 mM citric acid and the cells washed briefly in Hepes-buffered saline. Leukocytes and platelets are removed by adsorption with a mixture of α-cellulose and Sigmacell (1:1). The erythrocytes are further isolated from reticulocytes and residual white blood cells by centrifugation through a 45/75% Percoll step gradient for 10 min at 2500 rpm in a Sorvall SS34 rotor. The erythrocytes are recovered in the pellet while reticulocytes band at the 45/75% interface and the remaining white blood cells band at the 0/45% interface. The Percoll is removed from the erythrocytes by several washes in Hepes-buffered saline. Other materials that may be used to generate density gradients for isolation of erythrocytes include OPTIPREP, a 60% solution of iodixanol in water (from Axis-Shield, Dundee, Scotland).

[0612] Erythrocytes may be separated from reticulocytes, for example, using flow cytometry (See, e.g., Goodman et al., Exp. Biol. Med. 232:1470-1476 (2007)). In this instance, whole blood is centrifuged (550×g, 20 min, 25° C.) to separate cells from plasma. The cell pellet is resuspended in phosphate buffered saline solution and further fractionated on Ficoll-Paque (1.077 density), for example, by centrifugation (400×g, 30 min, 25° C.) to separate the erythrocytes from the white blood cells. The resulting cell pellet is resuspended in RPMI supplemented with 10% fetal bovine serum and sorted on a FACS instrument such as, for example, a Becton Dickinson FACSCalibur (BD Biosciences, Franklin Lakes, N.J., USA) based on size and granularity.

[0613] Erythrocytes may be isolated by immunomagnetic depletion (See, e.g., Goodman, et al., (2007) Exp. Biol. Med. 232:1470-1476). In this instance, magnetic beads with cell-type specific antibodies are used to eliminate non-erythrocytes. For example, erythrocytes are isolated from the majority of other blood components using a density gradient as described herein followed by immunomagnetic depletion of any residual reticulocytes. The cells are pre-treated with human antibody serum for 20 min at 25° C. and then treated with antibodies against reticulocyte specific antigens such as, for example, CD71 and CD36. The antibodies may be directly attached to magnetic beads or conjugated to PE, for example, to which magnetic beads with anti-PE antibody will react. The antibody-magnetic bead complex is able to selectively extract residual reticulocytes, for example, from the erythrocyte population.

[0614] Erythrocytes may also be isolated using apheresis. The process of apheresis involves removal of whole blood from a patient or donor, separation of blood components using centrifugation or cell sorting, withdrawal of one or more of the separated portions, and transfusion of remaining components back into the patient or donor. A number of instruments are currently in use for this purpose such as for example the Amicus and Alyx instruments from Baxter (Deerfield, Ill., USA), the Trima Accel instrument from Gambro BCT (Lakewood, Colo., USA), and the MCS+9000 instrument from Haemonetics (Braintree, Mass., USA). Additional purification methods may be necessary to achieve the appropriate degree of cell purity.

[0615] Reticulocytes are immature red blood cells and compose approximately 1% of the red blood cells in the human body. Reticulocytes develop and mature in the bone marrow. Once released into circulation, reticulocytes rapidly undergo terminal differentiation to mature erythrocytes. Like mature erythrocytes, reticulocytes do not have a cell nucleus. Unlike mature erythrocytes, reticulocytes maintain the ability to perform protein synthesis. In some embodiments, the aAPC comprises an enucleated erythrocyte.

[0616] Reticulocytes of varying age may be isolated from peripheral blood based on the differences in cell density as the reticulocytes mature. Reticulocytes may be isolated from peripheral blood using differential centrifugation through various density gradients. For example, Percoll gradients may be used to isolate reticulocytes (See, e.g., Noble et al., Blood 74:475-481 (1989)). Sterile isotonic Percoll solutions of density 1.096 and 1.058 g/ml are made by diluting Percoll (Sigma-Aldrich, Saint Louis, Mo., USA) to a final concentration of 10 mM triethanolamine, 117 mM NaCl, 5 mM glucose, and 1.5 mg/ml bovine serum albumin (BSA). These solutions have an osmolarity between 295 and 310 mOsm. Five milliliters, for example, of the first Percoll solution (density 1.096) is added to a sterile 15 ml conical centrifuge tube. Two milliliters, for example, of the second Percoll solution (density 1.058) is layered over the higher density first Percoll solution. Two to four milliliters of whole blood are layered on top of the tube. The tube is centrifuged at 250×g for 30 min in a refrigerated centrifuge with swing-out tube holders. Reticulocytes and some white cells migrate to the interface between the two Percoll layers. The cells at the interface are transferred to a new tube and washed twice with phosphate buffered saline (PBS) with 5 mM glucose, 0.03 mM sodium azide and 1 mg/ml BSA. Residual white blood cells are removed by chromatography in PBS over a size exclusion column.

[0617] Alternatively, reticulocytes may be isolated by positive selection using an immunomagnetic separation approach (See, e.g., Brun et al., Blood 76:2397-2403 (1990)). This approach takes advantage of the large number of transferrin receptors that are expressed on the surface of reticulocytes relative to erythrocytes prior to maturation. Magnetic beads coated with an antibody to the transferrin receptor may be used to selectively isolate reticulocytes from a mixed blood cell population. Antibodies to the transferrin receptor of a variety of mammalian species, including human, are available from commercial sources (e.g., Affinity BioReagents, Golden, Colo., USA; Sigma-Aldrich, Saint Louis, Mo., USA). The transferrin antibody may be directly linked to the magnetic beads. Alternatively, the transferrin antibody may be indirectly linked to the magnetic beads via a secondary antibody. For example, mouse monoclonal antibody 10D2 (Affinity BioReagents, Golden, Colo., USA) against human transferrin may be mixed with immunomagnetic beads coated with a sheep anti-mouse immunoglobulin G (Dynal/Invitrogen, Carlsbad, Calif., USA). The immunomagnetic beads are then incubated with a leukocyte-depleted red blood cell fraction. The beads and red blood cells are incubated at 22° C. with gentle mixing for 60-90 min followed by isolation of the beads with attached reticulocytes using a magnetic field. The isolated reticulocytes may be removed from the magnetic beads using, for example, DETACHaBEAD solution (from Invitrogen, Carlsbad, Calif., USA). Alternatively, reticulocytes may be isolated from in vitro growth and maturation of CD34+ hematopoietic stem cells using the methods described herein.

[0618] Terminally-differentiated, enucleated erythrocytes can be separated from other cells based on their DNA content. In a non-limiting example, cells are first labeled with a vital DNA dye, such as Hoechst 33342 (Invitrogen Corp.). Hoechst 33342 is a cell-permeant nuclear counterstain that emits blue fluorescence when bound to double-stranded DNA. Undifferentiated precursor cells, macrophages or other nucleated cells in the culture are stained by Hoechst 33342, while enucleated erythrocytes are Hoechst-negative. The Hoechst-positive cells can be separated from enucleated erythrocytes by using fluorescence activated cell sorters or other cell sorting techniques. The Hoechst dye can be removed from the isolated erythrocytes by dialysis or other suitable methods.

### Vehicles for Polypeptides Described Herein

[0619] While in many embodiments herein, the one or more (e.g., two or more) exogenous polypeptides are situated on or in an enucleated erythroid cell, it is understood that any polypeptide or combination of exogenous polypeptides described herein can also be situated on or in another vehicle. The vehicle can comprise, e.g., a cell, an erythroid cell, a corpuscle, a nanoparticle, a micelle, a liposome, or an exosome. For instance, in some aspects, the present disclosure provides a vehicle (e.g., a cell, an erythroid cell, a corpuscle, a nanoparticle, a micelle, a liposome, or an exosome) comprising, e.g., on its surface, one or more agents described herein. In some embodiments, the one or more agents comprise an agent selected from a polypeptide of any of Tables 1 or 14-24, or a fragment or variant thereof, or an antibody molecule thereto. In some embodiments, the vehicle comprises two or more agents described herein, e.g., any pair of agents described herein.

### Heterogeneous Populations of Cells

[0620] While in many embodiments herein, the one or more (e.g., two or more) exogenous polypeptides are situated on or in a single cell, it is understood that any polypeptide or combination of polypeptides described herein can also be situated on a plurality of cells. For instance, in some aspects, the disclosure provides a plurality of erythroid cells, wherein a first cell of the plurality comprises a first exogenous polypeptide and a second cell of the plurality comprises a second exogenous polypeptide. In some embodiments, the plurality of cells comprises two or more polypeptides described herein, e.g., any pair of polypeptides described herein. In some embodiments, less than 90%, 80%, 70%, 60%, 50%, 40%, 30%, 20%, 10%, 5%, 2%, or 1% of the cells in the population comprise both the first exogenous polypeptide and the second exogenous polypeptide.

### Cells Encapsulated in a Membrane

[0621] In some embodiments, enucleated erythroid cells or other vehicles described herein are encapsulated in a membrane, e.g., semi-permeable membrane. In some embodiments, the membrane comprises a polysaccharide, e.g., an anionic polysaccharide alginate. In some embodiments, the semipermeable membrane does not allow cells to pass through, but allows passage of small molecules or macromolecules, e.g., metabolites, proteins, or DNA. In some embodiments, the membrane is one described in Lienert et al., “Synthetic biology in mammalian cells: next generation research tools and therapeutics” Nature Reviews Molecular Cell Biology 15, 95-107 (2014), incorporated herein by reference in its entirety. While not wishing to be bound by theory, in some embodiments, the membrane shields the cells from the immune system and/or keeps a plurality of cells in proximity, facilitating interaction with each other or each other's products.

### Erythrocyte Precursor Cells

[0622] Provided herein are engineered erythrocyte precursor cells, and methods of making the engineered erythrocyte precursor cells, reticulocytes and erythrocytes.

[0623] Pluripotent stem cells give rise to erythrocytes by the process of erythropoiesis. The stem cell looks like a small lymphocyte and lacks the functional capabilities of the erythrocyte. The stem cells have the capacity of infinite division, something the mature cells lack. Some of the daughter cells arising from the stem cell acquire erythroid characters over generations and time. Most of the erythroid cells in the bone marrow have a distinct morphology but commitment to erythroid maturation is seen even in cells that have not acquired morphological features distinctive of the erythroid lineage. These cells are recognized by the type of colonies they form in vitro. Two such cells are recognized. Burst-forming unit erythroid (BFU-E) arise from the stem cell and gives rise to colony-forming unit erythroid (CFU-E). CFU-E gives rise to pronormoblast, the most immature of erythroid cells with a distinct morphology. BFU-E and CFU-E form a very small fraction of bone marrow cells. Morphologically five erythroid precursors are identifiable in the bone marrow stained with Romanovsky stains. The five stages from the most immature to the most mature are the proerythroblast, the basophilic normoblast (early erythroblast), polychromatophilic normoblast (intermediate erythroblast), orthochromatophilic normoblast (late erythroblast) and reticulocyte. BFU-E (burst forming unit-erythroid), CFU-E (erythroid colony-forming unit), pronormoblast (proerythroblast), basophilic normoblast, polychromatophilic normoblast and orthochromatophilic normoblast are lineage restricted.

[0624] Table 13 below summarizes the morphological features of erythrocyte precursor and erythrocyte cells.

TABLE 13
Morphological features of erythrocyte precursor and erythrocyte cells

| Cell | Nucleus |
|---|---|
| Hematopoietic stem cell (HSC) | Yes |
| CMP (Common myeloid progenitor) | Yes |
| CFU-S (spleen colony forming cell; | Yes; Can differentiate into |
| myeloid precursor cell) | erythrocytes, platelets, |
| | macrophages. |
| BFU-E (burst forming unit-erythroid) | Yes |
| CFU-E (erythroid colony-forming | Yes |
| unit) | |
| Pronormoblast (proerythroblast) | Yes; fine chromatin, many nucleoli |
| Basophilic Normoblast | Yes; granular chromatin, no |
| | nucleoli |
| Polychromatophilic Normoblast | Yes; chromatin is visibly clumped |
| | with dark staining areas |
| Orthochromatophilic normoblast | Yes; featureless nucleus with dense |
| | chromatin |
| Reticulocyte | No Nucleus |
| Erythrocyte (fully matured RBC) | No Nucleus |

[0625] Normal human erythrocytes express CD36, an adhesion molecule of monocytes, platelets, and endothelial cells (van Schravendijk M R et al., Blood. 1992 Oct. 15; 80(8):2105-14). Accordingly, in some embodiments, an anti-CD36 antibody can be used to identify human erythrocytes.

[0626] Any type of cell known in the art that is capable of differentiating into an erythrocyte, i.e., any erythrocyte precursor cell, can be modified in accordance with the methods described herein to produce engineered erythrocyte precursor cells. In certain embodiments, the erythrocyte precursor cells modified in accordance with the methods described herein are cells that are in the process of differentiating into an erythrocyte, i.e., the cells are of a type known to exist during mammalian erythropoiesis. For example, the cells may be pluripotent hematopoietic stem cells (HSCs) or CD34+ cells, multipotent myeloid progenitor cells, CFU-S cells, BFU-E cells, CFU-E cells, pronormoblasts (proerythroblast), basophilic normoblasts, polychromatophilic normoblasts and orthochromatophilic normoblasts. The modified erythrocyte precursor cells provided herein can be differentiated into engineered reticulocytes or erythrocytes in vitro using methods known in the art, i.e., using molecules known to promote erythropoiesis, e.g., SCF, Erythropoietin, IL-3, and/or GM-CSF, described herein below. Alternatively, the modified erythrocyte precursor cells are provided in a composition of the invention, and are capable of differentiating into erythrocytes upon administration to a subject in vivo.

[0627] In some embodiments, the erythroid precursor cell has not been genetically modified to delete and/or alter expression of an endogenous antigen presenting polypeptide (e.g. a MHC class I or MHC class II molecule).

[0628] In some embodiments, the erythrocyte precursor cells, e.g., hematopoietic stem cells, are from an O-negative donor.

### Culturing

[0629] Sources for generating aAPCs described herein include circulating cells such as erythroid cells. A suitable cell source may be isolated from a subject as described herein from patient-derived hematopoietic or erythroid progenitor cells, derived from immortalized erythroid cell lines, or derived from induced pluripotent stem cells, optionally cultured and differentiated. Methods for generating erythrocytes using cell culture techniques are well known in the art, e.g., Giarratana et al., Blood 2011, 118:5071, Huang et al., Mol Ther 2013, epub ahead of print September 3, or Kurita et al., PLOS One 2013, 8:e59890, the contents of each of which is incorporated by reference in its entirety herein. Protocols vary according to growth factors, starting cell lines, culture period, and morphological traits by which the resulting cells are characterized. Culture systems have also been established for blood production that may substitute for donor transfusions (Fibach et al. 1989 Blood 73:100). Recently, CD34+ cells were differentiated to the reticulocyte stage, followed by successful transfusion into a human subject (Giarratana et al., Blood 2011, 118:5071). It will be understood that in some embodiments, the patient-derived hematopoietic or erythroid progenitor cells, e.g., hematopoetic stem cells, are from an O-negative donor.

[0630] Provided herein are culturing methods for erythroid cells and aAPCs derived from erythroid cells. Erythroid cells can be cultured from hematopoietic progenitor cells, including, for example, CD34+ hematopoietic progenitor cells (Giarratana et al., Blood 2011, 118:5071), induced pluripotent stem cells (Kurita et al., PLOS One 2013, 8:e59890), and embryonic stem cells (Hirose et al. 2013 Stem Cell Reports 1:499). Cocktails of growth and differentiation factors that are suitable to expand and differentiate progenitor cells are known in the art. Examples of suitable expansion and differentiation factors include, but are not limited to, stem cell factor (SCF), an interleukin (IL) such as IL-1, IL-2, IL-3, IL-4, IL-5, IL-6, IL-7, IL-8, IL-9, IL-11, IL-12, CSF, G-CSF, thrombopoietin (TPO), GM-CSF, erythropoietin (EPO), Flt3, Flt2, PIXY 321, and leukemia inhibitory factor (LIF).

[0631] Erythroid cells can be cultured from hematopoietic progenitors, such as CD34+ cells, by contacting the progenitor cells with defined factors in a multi-step culture process. For example, erythroid cells can be cultured from hematopoietic progenitors in a three-step process.

[0632] The first step may comprise contacting the cells in culture with stem cell factor (SCF) at 1-1000 ng/mL, erythropoietin (EPO) at 1-100 U/mL, and interleukin-3 (IL-3) at 0.1-100 ng/mL. The first step optionally comprises contacting the cells in culture with a ligand that binds and activates a nuclear hormone receptor, such as e.g., the glucocorticoid receptor, the estrogen receptor, the progesterone receptor, the androgen receptor, or the pregnane x receptor. The ligands for these receptors include, for example, a corticosteroid, such as, e.g., dexamethasone at 10 nM-100 μM or hydrocortisone at 10 nM-100 μM; an estrogen, such as, e.g., beta-estradiol at 10 nM-100 μM; a progestogen, such as, e.g., progesterone at 10 nM-100 μM, hydroxyprogesterone at 10 nM-100 μM, 5a-dihydroprogesterone at 10 nM-100 μM, 11-deoxycorticosterone at 10 nM-100 μM, or a synthetic progestin, such as, e.g., chlormadinone acetate at 10 nM-100 μM; an androgen, such as, e.g., testosterone at 10 nM-100 μM, dihydrotestosterone at 10 nM-100 μM or androstenedione at 10 nM-100 μM; or a pregnane x receptor ligand, such as, e.g., rifampicin at 10 nM-100 μM, hyperforin at 10 nM-100 St. John's Wort (hypericin) at 10 nM-100 μM, or vitamin E-like molecules, such as, e.g., tocopherol at 10 nM-100 The first step may also optionally comprise contacting the cells in culture with an insulin-like molecule, such as, e.g., insulin at 1-50 μg/mL, insulin-like growth factor 1 (IGF-1) at 1-50 μg/mL, insulin-like growth factor 2 (IGF-2) at 1-50 μg/mL, or mechano-growth factor at 1-50 μg/mL. The first step further may optionally comprise contacting the cells in culture with transferrin at 0.1-5 mg/mL.

[0633] The first step may optionally comprise contacting the cells in culture with one or more interleukins (IL) or growth factors such as, e.g., IL-1, IL-2, IL-4, IL-5, IL-6, IL-7, IL-8, IL-9, IL-11, IL-12, granulocyte colony-stimulating factor (G-CSF), macrophage colony-stimulating factor (M-CSF), granulocyte-macrophage colony-stimulating factor (GM-CSF), thrombopoietin, fibroblast growth factor (FGF), platelet-derived growth factor (PDGF), transforming growth factor beta (TGF-B), tumor necrosis factor alpha (TNF-A), megakaryocyte growth and development factor (MGDF), leukemia inhibitory factor (LIF), and Flt3 ligand. Each interleukin or growth factor may typically be supplied at a concentration of 0.1-100 ng/mL. The first step may also optionally comprise contacting the cells in culture with serum proteins or non-protein molecules such as, e.g., fetal bovine serum (1-20%), human plasma (1-20%), plasmanate (1-20%), human serum (1-20%), albumin (0.1-100 mg/mL), or heparin (0.1-10 U/mL).

[0634] The second step may comprise contacting the cells in culture with stem cell factor (SCF) at 1-1000 ng/mL and erythropoietin (EPO) at 1-100 U/mL. The second step may also optionally comprise contacting the cells in culture with an insulin-like molecule, such as e.g., insulin at 1-50 μg/mL, insulin-like growth factor 1 (IGF-1) at 1-50 μg/mL, insulin-like growth factor 2 (IGF-2) at 1-50 μg/mL, or mechano-growth factor at 1-50 μg/mL. The second step may further optionally comprise contacting the cells in culture with transferrin at 0.1-5 mg/mL. The second may also optionally comprise contacting the cells in culture with serum proteins or non-protein molecules such as, e.g., fetal bovine serum (1-20%), human plasma (1-20%), plasmanate (1-20%), human serum (1-20%), albumin (0.1-100 mg/mL), or heparin (0.1-10 U/mL).

[0635] The third step may comprise contacting the cells in culture with erythropoietin (EPO) at 1-100 U/mL. The third step may optionally comprise contacting the cells in culture with stem cell factor (SCF) at 1-1000 ng/mL. The third step may further optionally comprise contacting the cells in culture with an insulin-like molecule, such as e.g., insulin at 1-50 μg/mL, insulin-like growth factor 1 (IGF-1) at 1-50 μg/mL, insulin-like growth factor 2 (IGF-2) at 1-50 μg/mL, or mechano-growth factor at 1-50 μg/mL. The third step may also optionally comprise contacting the cells in culture with transferrin at 0.1-5 mg/mL. The third step may also optionally comprise contacting the cells in culture with serum proteins or non-protein molecules such as, e.g., fetal bovine serum (1-20%), human plasma (1-20%), plasmanate (1-20%), human serum (1-20%), albumin (0.1-100 mg/mL), or heparin (0.1-10 U/mL).

[0636] In some embodiments, methods of expansion and differentiation of the aAPCs comprising an erythroid cell, e.g. an enucleated cell, presenting (e.g. comprising on the cell surface) one or more exogenous polypeptides, do not include culturing the aAPCs in a medium comprising a myeloproliferative receptor (mpl) ligand.

[0637] The culture process may optionally comprise contacting cells by a method known in the art with a molecule, e.g., a DNA molecule, an RNA molecule, a mRNA, an siRNA, a microRNA, a lncRNA, a shRNA, a hormone, or a small molecule, that activates or knocks down one or more genes. Target genes can include, for example, genes that encode a transcription factor, a growth factor, or a growth factor receptor, including but not limited to, e.g., GATA1, GATA2, CMyc, hTERT, p53, EPO, SCF, insulin, EPO-R, SCF-R, transferrin-R, insulin-R.

[0638] In some embodiments, CD34+ cells are placed in a culture containing varying amounts of IMDM, FBS, glutamine, BSA, holotransferrin, insulin, dexamethasone, .beta.-estradiol, IL-3, SCF, and erythropoietin, in three separate differentiation stages for a total of 22 days.

[0639] In some embodiments, CD34+ cells are placed in a culture containing varying amounts of IMDM, FBS, glutamine, BSA, holotransferrin, insulin, dexamethasone, .beta.-estradiol, IL-3, SCF, and thrombopoietin, in three separate differentiation stages for a total of 14 days.

[0640] In some embodiments, CD34+ cells are placed in a culture containing varying amounts of IMDM, FBS, glutamine, BSA, holotransferrin, insulin, dexamethasone, .beta.-estradiol, IL-3, SCF, and GCSF, in three separate differentiation stages for a total of 15 days.

[0641] In some embodiments, the erythroid cells are expanded at least 100, 1000, 2000, 5000, 10,000, 20,000, 50,000, or 100,000 fold (and optionally up to 100,000, 200,000, or 500,000 fold). Number of cells is measured, in some embodiments, using an automated cell counter. In some embodiments, the population of erythroid cells comprises at least 30, 35, 40, 45, 50, 55, 60, 65, 70, 75, 80, 85, 90, 95, or 98% (and optionally up to about 80, 90, or 100%) engineered erythroid cells. Enucleation is measured, in some embodiments, by FACS using a nuclear stain. In some embodiments, at least 30, 35, 40, 45, 50, 55, 60, 65, 70, 75, or 80% (and optionally up to about 70, 80, 90, or 100%) of erythroid cells in the population comprise one or more (e.g., 2, 3, 4 or more) of the exogenous polypeptides. Expression of the polypeptides is measured, in some embodiments, by erythroid cells using labeled antibodies against the polypeptides. In some embodiments, at least 30, 35, 40, 45, 50, 55, 60, 65, 70, 75, or 80% (and optionally up to about 70, 80, 90, or 100%) of erythroid cells in the population are enucleated and comprise one or more (e.g., 2, 3, 4, or more) of the exogenous polypeptides. In some embodiments, the population of erythroid cells comprises about 1×10⁹-2×10⁹, 2×10⁹-5×10⁹, 5×10⁹-1×10¹⁰, 1×10¹⁰-2×10¹⁰, 2×10¹⁰-5×10¹⁰, 5×10¹⁰-1×10¹¹, 1×10¹¹-2×10¹¹, 2×10″-5×10¹¹, 5×10¹¹-1×10¹², 1×10¹²-2×10¹², 2×10¹²-5×10¹², or 5×10¹²-1×10¹³ cells.

[0642] In some embodiments, it may be desirable during culturing to only partially differentiate the erythroid progenitor cells, e.g., hematopoietic stem cells, in vitro, allowing further differentiation, e.g., differentiation into reticulocytes or fully mature erythrocytes, to occur upon introduction to a subject in vivo (See, e.g., Neildez-Nguyen et al., Nature Biotech. 20:467-472 (2002)). It will be understood that, in various embodiments of the invention, maturation and/or differentiation in vitro may be arrested at any stage desired. For example, isolated CD34+ hematopoietic stem cells may be expanded in vitro as described elsewhere herein, e.g., in medium containing various factors, including, for example, interleukin 3, Flt3 ligand, stem cell factor, thrombopoietin, erythropoietin, transferrin, and insulin growth factor, to reach a desired stage of differentiation. The resulting engineered erythroid cells may be characterized by the surface expression of CD36 and GPA, and other characteristics specific to the particular desired cell type, and may be transfused into a subject where terminal differentiation to mature erythrocytes is allowed to occur.

[0643] In some embodiments, engineered erythroid cells are partially expanded from erythroid progenitor cells to any stage of maturation prior to but not including enucleation, and thus remain nucleated cells, e.g., erythrocyte precursor cells. In certain embodiments, the resulting cells are nucleated and erythroid lineage restricted. In certain embodiments, the resulting cells are selected from multipotent myeloid progenitor cells, CFU-S cells, BFU-E cells, CFU-E cells, pronormoblasts (proerythroblast), basophilic normoblasts, polychromatophilic normoblasts and orthochromatophilic normoblasts. The final differentiation steps, including enucleation, occur only after administration of the engineered erythroid cell to a subject, that is, in such embodiments, the enucleation step occurs in vivo. In another embodiment, engineered erythroid cells are expanded and differentiated in vitro through the stage of enucleation to become, e.g., reticulocytes. In such embodiments where the engineered erythroid cells are differentiated to the stage of reticulocytes, the final differentiation step to become erythrocytes occurs only after administration of the engineered erythroid cell to a subject, that is, the terminal differentiation step occurs in vivo. In another embodiment, engineered erythroid cells are expanded and differentiated in vitro through the terminal differentiation stage to become erythrocytes.

[0644] It will be further recognized that in some embodiments, the engineered erythroid cells may be expanded and differentiated from erythroid progenitor cells, e.g., hematopoietic stem cells, to become hematopoietic cells of different lineage, such as, for example, to become platelets. Methods for maturing and differentiating hematopoietic cells of various lineages, such as platelets, are well known in the art to the skilled artisan. In some embodiments, such engineered platelets expressing exogenous polypeptides as described herein are considered to be encompassed by the present invention.

[0645] In some embodiments of the above aspects and embodiments, the engineered erythroid cell is an enucleated cell. In some embodiments of the above aspects and embodiments, the engineered erythroid cell is a nucleated cell.

[0646] In some embodiments, an enucleated cell provided herein is a platelet. Methods of manufacturing platelets in vitro are known in the art (see, e.g., Wang and Zheng (2016) Springerplus 5(1): 787, and U.S. Pat. No. 9,574,178). Methods of manufacturing platelets including an exogenous polypeptide are described, e.g., in International Patent Application Publication Nos. WO2015/073587 and WO2015/153102, each of which is incorporated by reference in its entirety. Platelet production is in part regulated by signaling mechanisms induced by interaction between thrombopoietin (TPO) and its cellular receptor TPOR/MPUc-MPL. In addition, multiple cytokines (e.g., stem cell factor (SCF), IL-1, IL-3, IL-6, IL-11, leukemia inhibiting factor (LIF), G-CSF, GM-CSF, M-CSF, erythropoietin (EPO), kit ligand, and interferon) have been shown to possess thrombocytopoietic activity.

[0647] In some embodiments, platelets are generated from hematopoietic progenitor cells, such as CD34⁺ hematopoietic stem cells, induced pluripotent stem cells or embryonic stem cells. In some embodiments, platelets are produced by contacting the progenitor cells with defined factors in a multi-step culture process. In some embodiments, the multi-step culture process comprises: culturing a population of hematopoietic progenitor cells under conditions suitable to produce a population of megakaryocyte progenitor cells, and culturing the population of megakaryocyte progenitor cells under conditions suitable to produce platelets. Cocktails of growth and differentiation factors that are suitable to expand and differentiate progenitor cells and produce platelets are known in the art. Examples of suitable expansion and differentiation factors include, but are not limited to, stem cell factor (SCF), Flt-3/Flk-2 ligand (FL), TPO, IL-11, IL-3, IL-6, and IL-9. For instance, in some embodiments, platelets may be produced by seeding CD34⁺ HSCs in a serum-free medium at 2-4×10⁴ cells/mL, and refreshing the medium on culture day 4 by adding an equal volume of media. On culture day 6, cells are counted and analyzed: 1.5×10⁵ cells are washed and placed in 1 mL of the same medium supplemented with a cytokine cocktail comprising TPO (30 ng/mL), SCF (1 ng/mL), IL-6 (7.5 ng/mL), and IL-9 (13.5 ng/mL) to induce megakaryocyte differentiation. At culture day 10, from about one quarter to about half of the suspension culture is replaced with fresh media. The cells are cultured in a humidified atmosphere (10% CO₂) at 39° C. for the first 6 culture days, and at 37° C. for the last 8 culture days. Viable nucleated cells are counted with a hemocytometer following trypan blue staining. The differentiation state of platelets in culture can be assessed by flow cytometry or quantitative PCR as described in Examples 44 and 45 of in International Patent Application Publication No. WO2015/073587, incorporated herein by reference.

### Expression of Exogenous Polypeptides

[0648] In some embodiments, the aAPC comprising an engineered erythroid cell or enucleated cell presenting one or more exogenous polypeptides is generated by contacting a suitable isolated cell, e.g., an erythroid cell, a reticulocyte, an erythroid cell precursor, a platelet, or a platelet precursor, with an exogenous nucleic acid encoding a polypeptide of the disclosure (e.g. exogenous antigenic polypeptides, exogenous antigen-presenting polypeptides, exogenous costimulatory polypeptides, exogenous coinhibitory polypeptides, exogenous amino acid-depleting polypeptides, and exogenous Treg costimulatory polypeptides).

[0649] In some embodiments, the exogenous polypeptide is encoded by a DNA, which is contacted with a nucleated erythroid precursor cell or a nucleated platelet precursor cell. In some embodiments, the exogenous polypeptide is encoded by an RNA, which is contacted with a platelet, a nucleate erythroid cell, a nucleated platelet precursor cell, or a reticulocyte. In some embodiments, the exogenous polypeptide is contacted with a primary platelet, a nucleated erythroid cell, a nucleated platelet precursor cell, a reticulocyte, or an erythrocyte.

[0650] An exogenous polypeptide may be expressed from a transgene introduced into an erythroid cell by electroporation, chemical or polymeric transfection, viral transduction, mechanical membrane disruption, or other method; an exogenous polypeptide that is expressed from mRNA that is introduced into a cell by electroporation, chemical or polymeric transfection, viral transduction, mechanical membrane disruption, or other method; an exogenous polypeptide that is over-expressed from the native locus by the introduction of an external factor, e.g., a transcriptional activator, transcriptional repressor, or secretory pathway enhancer; and/or a polypeptide that is synthesized, extracted, or produced from a production cell or other external system and incorporated into the erythroid cell.

[0651] Exogenous polypeptides (e.g. exogenous antigenic polypeptides, exogenous antigen-presenting polypeptides, exogenous costimulatory polypeptides, exogenous coinhibitory polypeptides, exogenous amino acid-depleting polypeptides, and exogenous Treg costimulatory polypeptides) can be introduced by transfection of single or multiple copies of genes, transduction with a virus, or electroporation in the presence of DNA or RNA. Methods for expression of exogenous proteins in mammalian cells are well known in the art. For example, expression of exogenous factor IX in hematopoietic cells is induced by viral transduction of CD34+ progenitor cells, see Chang et al., Nat Biotechnol 2006, 24:1017.

[0652] In some embodiments, the two or more polypeptides are encoded in a single nucleic acid, e.g. a single vector. In embodiments, the single vector has a separate promoter for each gene, has two proteins that are initially transcribed into a single polypeptide having a protease cleavage site in the middle, so that subsequent proteolytic processing yields two proteins, or any other suitable configuration. In some embodiments, the two or more polypeptides are encoded in two or more nucleic acids, e.g., each vector encodes one of the polypeptides.

[0653] Nucleic acids such as DNA expression vectors or mRNA for producing the exogenous polypeptides may be introduced into progenitor cells (e.g., an erythroid cell progenitor or a platelet progenitor and the like) that are suitable to produce the exogenous polypeptides described herein. The progenitor cells can be isolated from an original source or obtained from expanded progenitor cell population via routine recombinant technology as provided herein. In some instances, the expression vectors can be designed such that they can incorporate into the genome of cells by homologous or non-homologous recombination by methods known in the art.

[0654] In some embodiments, hematopoietic progenitor cells, e.g., CD34+ hematopoietic progenitor cells, are contacted with a nucleic acid or nucleic acids encoding one or more exogenous polypeptides, and the cells are allowed to expand and differentiate in culture.

[0655] In some instances, e.g., for an aAPC that is an erythroid cell comprising one or more exogenous polypeptides (e.g. exogenous antigenic polypeptides, exogenous antigen-presenting polypeptides, exogenous costimulatory polypeptides, exogenous T cell expansion polypeptides, exogenous co-inhibitory polypeptides, exogenous proliferation inhibitors, exogenous amino acid-depleting polypeptides, exogenous regulatory T cell expansion polypeptides, exogenous placeholder polypeptides), a nucleic acid encoding a polypeptide that can selectively target and cut the genome, for example a CRISPR/Cas9, transcriptional activator-like effector nuclease (TALEN), or zinc finger nuclease, is used to direct the insertion of the exogenous nucleic acid of the expression vector encoding the exogenous polypeptide to a particular genomic location, for example the CR1 locus (1q32.2), the hemoglobin locus (11p15.4). Thus, in one aspect, the present disclosure features a method of making an immunologically compatible artificial antigen presenting cell (aAPC), wherein the aAPC comprises an engineered erythroid cell that expresses an exogenous antigenic polypeptide, the method comprising contacting the aAPC with a nuclease and at least one gRNA which cleaves an endogenous MHC nucleic acid, wherein the endogenous MHC nucleic acid is repaired by a gene editing pathway and results in a decrease in the level of expression of the endogenous MHC nucleic acid, thereby making the immunologically compatible aAPC.

[0656] In some embodiments, one or more exogenous polypeptides (e.g. exogenous antigenic polypeptides, exogenous antigen-presenting polypeptides, exogenous costimulatory polypeptides, exogenous coinhibitory polypeptides, exogenous amino acid-depleting polypeptides, and exogenous Treg costimulatory polypeptides) may be cloned into plasmid constructs for transfection. Methods for transferring expression vectors into cells that are suitable to produce the aAPCs described herein include, but are not limited to, viral mediated gene transfer, liposome mediated transfer, transformation, gene guns, transfection and transduction, e.g., viral mediated gene transfer such as the use of vectors based on DNA viruses such as adenovirus, adenoassociated virus and herpes virus, as well as retroviral based vectors. Examples of modes of gene transfer include e.g., naked DNA, CaPO₄ precipitation, DEAE dextran, electroporation, protoplast fusion, lipofection, and cell microinjection.

[0657] In some embodiments, recombinant DNA encoding each exogenous polypeptide may be cloned into a lentiviral vector plasmid for integration into erythroid cells. In some embodiments, the lentiviral vector comprises DNA encoding a single exogenous polypeptide for integration into erythroid cells. In other embodiments, the lentiviral vector comprises two, three, four or more exogenous polypeptides as described herein for integration into erythroid cells. In some embodiments, recombinant DNA encoding the one or more exogenous polypeptides may be cloned into a plasmid DNA construct encoding a selectable trait, such as an antibiotic resistance gene. In some embodiments, recombinant DNA encoding the exogenous polypeptides may be cloned into a plasmid construct that is adapted to stably express each recombinant protein in the erythroid cells.

[0658] In some embodiments, the lentiviral system may be employed where the transfer vector with exogenous polypeptides sequences (e.g., one, two, three, four or more exogenous polypeptide sequences), an envelope vector, and a packaging vector are each transfected into host cells for virus production. In some embodiments, the lentiviral vectors may be transfected into host cells by any of calcium phosphate precipitation transfection, lipid based transfection, or electroporation, and incubated overnight. For embodiments where the exogenous polypeptide sequence may be accompanied by a fluorescence reporter, inspection of the host cells for florescence may be checked after overnight incubation. The culture medium of the host cells comprising virus particles may be harvested 2 or 3 times every 8-12 hours and centrifuged to sediment detached cells and debris. The culture medium may then be used directly, frozen or concentrated as needed.

[0659] A progenitor cell subject to transfer of an exogenous nucleic acid that encodes an exogenous polypeptide can be cultured under suitable conditions allowing for differentiation into mature enucleated red blood cells, e.g., the in vitro culturing process described herein. The resulting enucleated red blood cells display proteins associated with mature erythrocytes, e.g., hemoglobin, glycophorin A, and exogenous polypeptides which can be validated and quantified by standard methods (e.g., Western blotting or FACS analysis). Isolated mature enucleated red blood cells comprising an exogenous antigen-presenting polypeptide and an exogenous antigenic polypeptide and platelets comprising an exogenous antigen-presenting polypeptide and an exogenous antigenic polypeptide are two non-limiting examples of aAPCs of the disclosure.

[0660] In some embodiments, the aAPC is generated by contacting a reticulocyte with an exogenous nucleic acid encoding an antigenic polypeptide. In some embodiments, the antigenic polypeptide is encoded by an RNA which is contacted with a reticulocyte. In some embodiments, the antigenic polypeptide is a polypeptide which is contacted with a reticulocyte.

[0661] Isolated reticulocytes may be transfected with mRNA encoding one or more exogenous polypeptides (e.g. exogenous antigenic polypeptides, exogenous antigen-presenting polypeptides, exogenous costimulatory polypeptides, exogenous coinhibitory polypeptides, exogenous amino acid-depleting polypeptides, and exogenous Treg costimulatory polypeptides) to generate an aAPC. Messenger RNA may be derived from in vitro transcription of a cDNA plasmid construct containing the coding sequence corresponding to the one or more exogenous polypeptides. For example, the cDNA sequence corresponding to the exogenous polypeptide may be inserted into a cloning vector containing a promoter sequence compatible with specific RNA polymerases. For example, the cloning vector ZAP EXPRESS pBK-CMV (Stratagene, La Jolla, Calif., USA) contains T3 and T7 promoter sequence compatible with T3 and T7 RNA polymerase, respectively. For in vitro transcription of sense mRNA, the plasmid is linearized at a restriction site downstream of the stop codon(s) corresponding to the end of the coding sequence of the exogenous polypeptide. The mRNA is transcribed from the linear DNA template using a commercially available kit such as, for example, the RNAMAXX High Yield Transcription Kit (from Stratagene, La Jolla, Calif., USA). In some instances, it may be desirable to generate 5′-m7GpppG-capped mRNA. As such, transcription of a linearized cDNA template may be carried out using, for example, the mMESSAGE mMACHINE High Yield Capped RNA Transcription Kit from Ambion (Austin, Tex., USA). Transcription may be carried out in a reaction volume of 20-100 μl at 37° C. for 30 min to 4 h. The transcribed mRNA is purified from the reaction mix by a brief treatment with DNase I to eliminate the linearized DNA template followed by precipitation in 70% ethanol in the presence of lithium chloride, sodium acetate or ammonium acetate. The integrity of the transcribed mRNA may be assessed using electrophoresis with an agarose-formaldehyde gel or commercially available Novex pre-cast TBE gels (e.g., Novex, Invitrogen, Carlsbad, Calif., USA).

[0662] Messenger RNA encoding the one or more exogenous polypeptides (e.g., exogenous antigenic polypeptides, exogenous antigen-presenting polypeptides, exogenous costimulatory polypeptides, exogenous coinhibitory polypeptides, exogenous amino acid-depleting polypeptides, and exogenous Treg costimulatory polypeptides) may be introduced into reticulocytes using a variety of approaches including, for example, lipofection and electroporation (van Tandeloo et al., Blood 98:49-56 (2001)). For lipofection, for example, 5 μg of in vitro transcribed mRNA in Opti-MEM (Invitrogen, Carlsbad, Calif., USA) is incubated for 5-15 min at a 1:4 ratio with the cationic lipid DMRIE-C(Invitrogen). Alternatively, a variety of other cationic lipids or cationic polymers may be used to transfect cells with mRNA including, for example, DOTAP, various forms of polyethylenimine, and polyL-lysine (Sigma-Aldrich, Saint Louis, Mo., USA), and Superfect (Qiagen, Inc., Valencia, Calif., USA; See, e.g., Bettinger et al., Nucleic Acids Res. 29:3882-3891 (2001)). The resulting mRNA/lipid complexes are incubated with cells (1-2×10⁶ cells/ml) for 2 h at 37° C., washed and returned to culture. For electroporation, for example, about 5 to 20×10⁶ cells in 500 μl of Opti-MEM (Invitrogen, Carlsbad, Calif., USA) are mixed with about 20 μg of in vitro transcribed mRNA and electroporated in a 0.4-cm cuvette using, for example, and Easyject Plus device (EquiBio, Kent, United Kingdom). In some instances, it may be necessary to test various voltages, capacitances and electroporation volumes to determine the useful conditions for transfection of a particular mRNA into a reticulocyte. In general, the electroporation parameters required to efficiently transfect cells with mRNA appear to be less detrimental to cells than those required for electroporation of DNA (van Tandeloo et al., Blood 98:49-56 (2001)).

[0663] Alternatively, mRNA may be transfected into a reticulocyte using a peptide-mediated RNA delivery strategy (see, e.g., Bettinger et al., Nucleic Acids Res. 29:3882-3891 (2001)). For example, the cationic lipid polyethylenimine 2 kDA (Sigma-Aldrich, Saint Louis, Mo., USA) may be combined with the melittin peptide (Alta Biosciences, Birmingham, UK) to increase the efficiency of mRNA transfection, particularly in post-mitotic primary cells. The mellitin peptide may be conjugated to the PEI using a disulfide cross-linker such as, for example, the heterobifunctional cross-linker succinimidyl 3-(2-pyridyldithio) propionate. In vitro transcribed mRNA is preincubated for 5 to 15 min with the mellitin-PEI to form an RNA/peptide/lipid complex. This complex is then added to cells in serum-free culture medium for 2 to 4 h at 37° C. in a 5% CO₂ humidified environment and then removed and the transfected cells allowed to continue growing in culture.

[0664] In some embodiments, the aAPC is generated by contacting a suitable isolated erythroid cell precursor or a platelet precursor with an exogenous nucleic acid encoding one or more exogenous polypeptides (e.g., exogenous antigenic polypeptides, exogenous antigen-presenting polypeptides, exogenous costimulatory polypeptides, exogenous coinhibitory polypeptides, exogenous amino acid-depleting polypeptides, and exogenous Treg costimulatory polypeptides). In some embodiments, the exogenous polypeptide is encoded by a DNA, which is contacted with a nucleated erythroid precursor cell or a nucleated platelet precursor cell. In some embodiments, the exogenous polypeptide is encoded by an RNA, which is contacted with a platelet, a nucleate erythroid cell, or a nucleated platelet precursor cell.

[0665] The one or more exogenous polypeptides (e.g. exogenous antigenic polypeptides, exogenous antigen-presenting polypeptides, exogenous costimulatory polypeptides, exogenous coinhibitory polypeptides, exogenous amino acid-depleting polypeptides, and exogenous Treg costimulatory polypeptides) may be genetically introduced into erythroid cell precursors, platelet precursor, or nucleated erythroid cells prior to terminal differentiation using a variety of DNA techniques, including transient or stable transfections and gene therapy approaches. The exogenous polypeptides may be expressed on the surface and/or in the cytoplasm of mature red blood cell or platelet.

[0666] Viral gene transfer may be used to transfect the cells with DNA encoding one or more exogenous polypeptides (e.g., exogenous antigenic polypeptides, exogenous antigen-presenting polypeptides, exogenous costimulatory polypeptides, exogenous coinhibitory polypeptides, exogenous amino acid-depleting polypeptides, and exogenous Treg costimulatory polypeptides). A number of viruses may be used as gene transfer vehicles including Moloney murine leukemia virus (MMLV), adenovirus, adeno-associated virus (AAV), herpes simplex virus (HSV), lentiviruses such as human immunodeficiency virus 1 (HIV 1), and spumaviruses such as foamy viruses, for example (See, e.g., Osten et al., HEP 178:177-202 (2007)). Retroviruses, for example, efficiently transduce mammalian cells including human cells and integrate into chromosomes, conferring stable gene transfer.

[0667] One or more exogenous polypeptides (e.g., exogenous antigenic polypeptides, exogenous antigen-presenting polypeptides, exogenous costimulatory polypeptides, exogenous coinhibitory polypeptides, exogenous amino acid-depleting polypeptides, and exogenous Treg costimulatory polypeptides) may be transfected into an erythroid cell precursor, a platelet precursor, or a nucleated erythroid cell, expressed and subsequently retained and exhibited in a mature red blood cell or platelet. A suitable vector is the Moloney murine leukemia virus (MMLV) vector backbone (Malik et al., Blood 91:2664-2671 (1998)). Vectors based on MMLV, an oncogenic retrovirus, are currently used in gene therapy clinical trials (Hossle et al., News Physiol. Sci. 17:87-92 (2002)). For example, a DNA construct containing the cDNA encoding an exogenous polypeptide can be generated in the MMLV vector backbone using standard molecular biology techniques. The construct is transfected into a packaging cell line such as, for example, PA317 cells and the viral supernatant is used to transfect producer cells such as, for example, PG13 cells. The PG13 viral supernatant is incubated with an erythroid cell precursor, a platelet precursor, or a nucleated erythroid cell that has been isolated and cultured or has been freshly isolated as described herein. The expression of the exogenous polypeptide may be monitored using FACS analysis (fluorescence-activated cell sorting), for example, with a fluorescently labeled antibody directed against the exogenous polypeptide, if it is located on the surface of the aAPC. Similar methods may be used to express an exogenous polypeptide that is located in the inside of the aAPC.

[0668] Optionally, a fluorescent tracking molecule such as, for example, green fluorescent protein (GFP) may be transfected using a viral-based approach (Tao et al., Stem Cells 25:670-678 (2007)). Ecotopic retroviral vectors containing DNA encoding the enhanced green fluorescent protein (EGFP) or a red fluorescent protein (e.g., DsRed-Express) are packaged using a packaging cell such as, for example, the Phoenix-Eco cell line (distributed by Orbigen, San Diego, Calif.). Packaging cell lines stably express viral proteins needed for proper viral packaging including, for example, gag, pol, and env. Supernatants from the Phoenix-Eco cells into which viral particles have been shed are used to transduce e.g., erythroid cell precursors, platelet precursors, or a nucleated erythroid cells. In some instances, transduction may be performed on a specially coated surface such as, for example, fragments of recombinant fibronectin to improve the efficiency of retroviral mediated gene transfer (e.g., RetroNectin, Takara Bio USA, Madison, Wis.). Cells are incubated in RetroNectin-coated plates with retroviral Phoenix-Eco supernatants plus suitable co-factors. Transduction may be repeated the next day. In this instance, the percentage of cells expressing EGFP or DsRed-Express may be assessed by FACS. Other reporter genes that may be used to assess transduction efficiency include, for example, beta-galactosidase, chloramphenicol acetyltransferase, and luciferase as well as low-affinity nerve growth factor receptor (LNGFR), and the human cell surface CD24 antigen (Bierhuizen et al., Leukemia 13:605-613 (1999)).

[0669] Nonviral vectors may be used to introduce genetic material into suitable erythroid cells, platelets or precursors thereof to generate aAPCs. Nonviral-mediated gene transfer differs from viral-mediated gene transfer in that the plasmid vectors contain no proteins, are less toxic and easier to scale up, and have no host cell preferences. The “naked DNA” of plasmid vectors is by itself inefficient in delivering genetic material encoding a polypeptide to a cell and therefore is combined with a gene delivery method that enables entry into cells. A number of delivery methods may be used to transfer nonviral vectors into suitable erythroid cells, platelets or precursors thereof including chemical and physical methods.

[0670] A nonviral vector encoding one or more exogenous polypeptides (e.g., exogenous antigenic polypeptides, exogenous antigen-presenting polypeptides, exogenous costimulatory polypeptides, exogenous coinhibitory polypeptides, exogenous amino acid-depleting polypeptides, and exogenous Treg costimulatory polypeptides) may be introduced into suitable erythroid cells, platelets or precursors thereof using synthetic macromolecules such as cationic lipids and polymers (Papapetrou et al., Gene Therapy 12:S118-S130 (2005)). Cationic liposomes, for example form complexes with DNA through charge interactions. The positively charged DNA/lipid complexes bind to the negative cell surface and are taken up by the cell by endocytosis. This approach may be used, for example, to transfect hematopoietic cells (See, e.g., Keller et al., Gene Therapy 6:931-938 (1999)). For erythroid cells, platelets or precursors thereof the plasmid DNA (approximately 0.5 μg in 25-100 μL of a serum free medium, such as, for example, OptiMEM (Invitrogen, Carlsbad, Calif.)) is mixed with a cationic liposome (approximately 4μg in 25 μL of serum free medium) such as the commercially available transfection reagent Lipofectamine™ (Invitrogen, Carlsbad, Calif.) and allowed to incubate for at least 20 min to form complexes. The DNA/liposome complex is added to suitable erythroid cells, platelets or precursors thereof and allowed to incubate for 5-24 h, after which time transgene expression of the polypeptide may be assayed. Alternatively, other commercially available liposome transfection agents may be used (e.g., In vivo GeneSHUTTLE., Qbiogene, Carlsbad, Calif.).

[0671] Optionally, a cationic polymer such as, for example, polyethylenimine (PEI) may be used to efficiently transfect erythroid cell progenitor cells, for example hematopoietic and umbilical cord blood-derived CD34+ cells (See, e.g., Shin et al., Biochim. Biophys. Acta 1725:377-384 (2005)). Human CD34+ cells are isolated from human umbilical cord blood and cultured in Iscove's modified Dulbecco's medium supplemented with 200 ng/ml stem cell factor and 20% heat-inactivated fetal bovine serum. Plasmid DNA encoding the exogenous polypeptide is incubated with branched or linear PEIs varying in size from 0.8 K to 750 K (Sigma Aldrich, Saint Louis, Mo., USA; Fermetas, Hanover, Md., USA). PEI is prepared as a stock solution at 4.2 mg/ml distilled water and slightly acidified to pH 5.0 using HCl. The DNA may be combined with the PEI for 30 min at room temperature at various nitrogen/phosphate ratios based on the calculation that 1 μg of DNA contains 3 nmol phosphate and 1 μl of PEI stock solution contains 10 nmol amine nitrogen. The isolated CD34+ cells are seeded with the DNA/cationic complex, centrifuged at 280×g for 5 min and incubated in culture medium for 4 or more h until gene expression of the polypeptide is assessed.

[0672] A plasmid vector may be introduced into suitable erythroid cells, platelets or precursors thereof using a physical method such as particle-mediated transfection, “gene gun”, biolistics, or particle bombardment technology (Papapetrou, et al., (2005) Gene Therapy 12:S118-S130). In this instance, DNA encoding the polypeptide is absorbed onto gold particles and administered to cells by a particle gun. This approach may be used, for example, to transfect erythroid progenitor cells, e.g., hematopoietic stem cells derived from umbilical cord blood (See, e.g., Verma et al., Gene Therapy 5:692-699 (1998)). As such, umbilical cord blood is isolated and diluted three fold in phosphate buffered saline. CD34+ cells are purified using an anti-CD34 monoclonal antibody in combination with magnetic microbeads coated with a secondary antibody and a magnetic isolation system (e.g., Miltenyi MiniMac System, Auburn, Calif., USA). The CD34+ enriched cells may be cultured as described herein. For transfection, plasmid DNA encoding the polypeptide is precipitated onto a particle, for example gold beads, by treatment with calcium chloride and spermidine. Following washing of the DNA-coated beads with ethanol, the beads may be delivered into the cultured cells using, for example, a Biolistic PDS-1000/He System (Bio-Rad, Hercules, Calif., USA). A reporter gene such as, for example, beta-galactosidase, chloramphenicol acetyltransferase, luciferase, or green fluorescent protein may be used to assess efficiency of transfection.

[0673] Optionally, electroporation methods may be used to introduce a plasmid vector into suitable erythroid cells, platelets or precursors thereof. Electroporation creates transient pores in the cell membrane, allowing for the introduction of various molecules into the cells including, for example, DNA and RNA as well as antibodies and drugs. As such, CD34+ cells are isolated and cultured as described herein. Immediately prior to electroporation, the cells are isolated by centrifugation for 10 min at 250×g at room temperature and resuspended at 0.2-10×10⁶ viable cells/ml in an electroporation buffer such as, for example, X-VIVO 10 supplemented with 1.0% human serum albumin (HSA). The plasmid DNA (1-50 μg) is added to an appropriate electroporation cuvette along with 500 μl of cell suspension. Electroporation may be done using, for example, an ECM 600 electroporator (Genetronics, San Diego, Calif., USA) with voltages ranging from 200 V to 280 V and pulse lengths ranging from 25 to 70 milliseconds. A number of alternative electroporation instruments are commercially available and may be used for this purpose (e.g., Gene Pulser XCELL, BioRad, Hercules, Calif.; Cellject Duo, Thermo Science, Milford, Mass.). Alternatively, efficient electroporation of isolated CD34+ cells may be performed using the following parameters: 4 mm cuvette, 1600 μF, 550 V/cm, and 10 μg of DNA per 500 μl of cells at 1×10⁵ cells/ml (Oldak et al., Acta Biochimica Polonica 49:625-632 (2002)).

[0674] Nucleofection, a form of electroporation, may also be used to transfect suitable erythroid cells, platelets or precursors thereof. In this instance, transfection is performed using electrical parameters in cell-type specific solutions that enable DNA (or other reagents) to be directly transported to the nucleus thus reducing the risk of possible degradation in the cytoplasm. For example, a Human CD34 CELL NYCLEOFECTOR Kit (from Amaxa Inc.) may be used to transfect suitable erythroid cells, platelets or precursors thereof. In this instance, 1-5×10⁶ cells in Human CD34 Cell NUCLEOFECTOR Solution are mixed with 1-5 μg of DNA and transfected in the NUCLEOFECTOR instrument using preprogrammed settings as determined by the manufacturer.

[0675] Erythroid cells, platelets or precursors thereof may be non-virally transfected with a conventional expression vector which is unable to self-replicate in mammalian cells unless it is integrated in the genome. Alternatively, erythroid cells, platelets or precursors thereof may be transfected with an episomal vector which may persist in the host nucleus as autonomously replicating genetic units without integration into chromosomes (Papapetrou et al., Gene Therapy 12:S118-S130 (2005)). These vectors exploit genetic elements derived from viruses that are normally extrachromosomally replicating in cells upon latent infection such as, for example, EBV, human polyomavirus BK, bovine papilloma virus-1 (BPV-1), herpes simplex virus-1 (HSV) and Simian virus 40 (SV40). Mammalian artificial chromosomes may also be used for nonviral gene transfer (Vanderbyl et al., Exp. Hematol. 33:1470-1476 (2005)).

[0676] Exogenous nucleic acids encoding one or more exogenous polypeptides (e.g., exogenous antigenic polypeptides, exogenous antigen-presenting polypeptides, exogenous costimulatory polypeptides, exogenous coinhibitory polypeptides, exogenous amino acid-depleting polypeptides, and exogenous Treg costimulatory polypeptides) may be assembled into expression vectors by standard molecular biology methods known in the art, e.g., restriction digestion, overlap-extension PCR, and Gibson assembly.

[0677] Exogenous nucleic acids may comprise a gene encoding one or more exogenous polypeptides (e.g., exogenous antigenic polypeptides, exogenous antigen-presenting polypeptides, exogenous costimulatory polypeptides, exogenous coinhibitory polypeptides, exogenous amino acid-depleting polypeptides, and exogenous Treg costimulatory polypeptides) that are not normally expressed on the cell surface, e.g., of an erythroid cell, fused to a gene that encodes an endogenous or native membrane protein, such that the exogenous polypeptide is expressed on the cell surface. For example, a exogenous gene encoding an exogenous antigenic polypeptide can be cloned at the N terminus following the leader sequence of a type 1 membrane protein, at the C terminus of a type 2 membrane protein, or upstream of the GPI attachment site of a GPI-linked membrane protein.

[0678] Standard cloning methods can be used to introduce flexible amino acid linkers between two fused genes. For example, the flexible linker is a poly-glycine poly-serine linker such as [Gly4Ser]3_(SEQ ID NO: 1) commonly used in generating single-chain antibody fragments from full-length antibodies (Antibody Engineering: Methods & Protocols, Lo 2004), or ala-gly-ser-thr polypeptides such as those used to generate single-chain Arc repressors (Robinson & Sauer, PNAS 1998). In some embodiments, the flexible linker provides the polypeptide with more flexibility and steric freedom than the equivalent construct without the flexible linker.

[0679] An epitope tag may be placed between two fused genes, such as, e.g., a nucleic acid sequence encoding an HA epitope tag—amino acids YPYDVPDYA (SEQ ID NO: 2), a CMyc tag—amino acids EQKLISEEDL (SEQ ID NO: 3), or a Flag tag—amino acids DYKDDDDK (SEQ ID NO: 4). The epitope tag may be used for the facile detection and quantification of expression using antibodies against the epitope tag by flow cytometry, western blot, or immunoprecipitation.

[0680] In some embodiments, the aAPC comprises one or more exogenous polypeptides (e.g., exogenous antigenic polypeptides, exogenous antigen-presenting polypeptides, exogenous costimulatory polypeptides, exogenous coinhibitory polypeptides, exogenous amino acid-depleting polypeptides, and exogenous Treg costimulatory polypeptides) and at least one other heterologous polypeptide. The at least one other heterologous polypeptide can be a fluorescent protein. The fluorescent protein can be used as a reporter to assess transduction efficiency. In some embodiments, the fluorescent protein is used as a reporter to assess expression levels of the exogenous polypeptide if both are made from the same transcript. In some embodiments, the at least one other polypeptide is heterologous and provides a function, such as, e.g., multiple antigens, multiple capture targets, enzyme cascade. In some embodiments, the recombinant nucleic acid comprises a gene encoding an antigenic polypeptide and a second gene, wherein the second gene is separated from the gene encoding the antigenic polypeptide by a viral-derived T2A sequence (gagggcagaggaagtcttctaacatgcggtgacgtggaggsgsstcccggccct (SEQ ID NO: 5)) that is post-translationally cleaved into two mature proteins.

[0681] In some embodiments, the exogenous nucleic acid encoding an exogenous antigen-presenting polypeptide comprises a gene sequence for a MHC cell surface protein that is fused to the 3′ end of the sequence for Kell and amplified using PCR. In some embodiments, the exogenous nucleic acid encoding an exogenous antigen-presenting polypeptide comprises a gene sequence for a MHC cell surface protein that is fused to a poly-glycine/serine linker, followed by the 3′ end of the sequence for Kell, and amplified using PCR. In some embodiments, the exogenous nucleic acid encoding an exogenous antigen-presenting polypeptide comprises the 3′ end of a gene sequence for a MHC cell surface protein that is fused to an epitope tag sequence, of which may be one, or a combination of, an; HA-tag, Green fluorescent protein tag, Myc-tag, chitin binding protein, maltose binding protein, glutathione-S-transferase, poly(His)tag, thioredoxin, poly(NANP), FLAG-tag, V5-tag, AviTag, Calmodulin-tag, polyglutamate-tag, E-tag, S-tag, SBP-tag, Softag-1, Softag-3, Strep-tag, TC-tag, VSV-tag, Xpress-tag, Isopeptag, SpyTag, biotin carboxyl carrier protein, Nus-tag, Fc-tag, or Ty-tag. The entire construct is fused to the 3′ end of the sequence for Kell and then amplified using PCR. The exogenous gene constructs encoding the various exogenous antigen presenting polypeptides are, for example, subsequently loaded into a lentiviral vector and used to transduce a cell population.

[0682] In some embodiments, a population of erythroid cells is incubated with lentiviral vectors comprising exogenous nucleic acid encoding one or more exogenous polypeptides (e.g., exogenous antigenic polypeptides, exogenous antigen-presenting polypeptides, exogenous costimulatory polypeptides, exogenous coinhibitory polypeptides, exogenous amino acid-depleting polypeptides, and exogenous Treg costimulatory polypeptides), specific plasmids of which may include; pLKO.1 puro, PLKO.1-TRC cloning vector, pSico, FUGW, pLVTHM, pLJM1, pLion11, pMD2.G, pCMV-VSV-G, pCI-VSVG, pCMV-dR8.2 dvpr, psPAX2, pRSV-Rev, and pMDLg/pRRE to generate an aAPC. The vectors may be administered at 10, 100, 1,000, 10,000 pfu and incubated for 12 hrs.

[0683] In certain embodiments, the aAPC is an erythroid cell that presents, e.g. comprises on the cell surface, an exogenous antigen-presenting polypeptide that is conjugated to one or more exogenous antigenic polypeptides. In other embodiments, the aAPC is an erythroid cell that presents, e.g. comprises on the cell surface, an exogenous antigen-presenting polypeptide, an exogenous antigenic polypeptide and at least one exogenous costimulatory polypeptide that is part of a conjugate pair. In other embodiments, the aAPC is an erythroid cell that presents, e.g. comprises on the cell surface, an exogenous antigen-presenting polypeptide, an exogenous antigenic polypeptide and at least one exogenous co-inhibitory polypeptide that is part of a conjugate pair. In some embodiments, the erythroid cell is an enucleated cell. In some embodiments, the erythroid cell is a nucleated cell.

[0684] Conjugation may be achieved chemically or enzymatically. Chemical conjugation may be accomplished by covalent bonding of the exogenous antigen-presenting polypeptide to one or more exogenous antigenic polypeptides, with or without the use of a linker. Chemical conjugation may be accomplished by the covalent bonding of a costimulatory polypeptide and a binding pair member, with or without the use of a linker. Chemical conjugation may be accomplished by the covalent bonding of a coinhibitory polypeptide and a binding pair member, with or without the use of a linker. The formation of such conjugates is within the skill of artisans and various techniques are known for accomplishing the conjugation, with the choice of the particular technique being guided by the materials to be conjugated. The addition of amino acids to the polypeptide (C- or N-terminal) which contain ionizable side chains, e.g., aspartic acid, glutamic acid, lysine, arginine, cysteine, histidine, or tyrosine, and are not contained in the active portion of the polypeptide sequence, serve in their unprotonated state as a potent nucleophile to engage in various bioconjugation reactions with reactive groups attached to polymers, e.g., homo- or hetero-bi-functional PEG (e.g., Lutolf and Hubbell, Biomacromolecules 2003; 4:713-22, Hermanson, Bioconjugate Techniques, London. Academic Press Ltd; 1996).

[0685] In an embodiment, the exogenous antigen-presenting polypeptide may be bound to one or more exogenous antigenic polypeptides through a biotin-streptavidin bridge. In other embodiments, the costimulatory polypeptide and a binding pair member are bound through a biotin-streptavidin bridge. In other embodiments, the coinhibitory polypeptide and a binding pair member are bound through a biotin-streptavidin bridge.

[0686] For example, a biotinylated antigenic polypeptide may be linked to a non-specifically biotinylated surface of the exogenous antigen-presenting polypeptide through a streptavidin bridge. Biotin conjugation can occur by a number of chemical means (See, e.g., Hirsch et al., Methods Mol. Biol. 295: 135-154 (2004)). The exogenous antigen-presenting polypeptide may be biotinylated using an amine reactive biotinylation reagent such as, for example, EZ-Link Sulfo-NHS-SS-Biotin (sulfosuccinimidyl 2-(biotinamido)-ethyl-1,3-dithiopropionate; Pierce-Thermo Scientific, Rockford, Ill., USA; See, e.g., Jaiswal et al., Nature Biotech. 21:47-51 (2003)). For example, isolated erythroid cells may be incubated for 30 min at 4° C. in 1 mg/ml solution of sulfo-NHS-SS in phosphate-buffered saline. Excess biotin reagent is removed by washing the cells with Tris-buffered saline. The biotinylated cells are then reacted with the biotinylated exogenous antigenic polypeptide in the presence of streptavidin to form an aAPC presenting an exogenous antigen-presenting polypeptide that is bound to one or more exogenous antigenic polypeptides through a biotin-streptavidin bridge.

[0687] Erythroid cells described herein can also be produced using coupling reagents to link an exogenous polypeptide to a cell. For instance, click chemistry can be used. Coupling reagents can be used to couple an exogenous polypeptide to a cell, for example, when the exogenous polypeptide is a complex or difficult to express polypeptide, e.g., a polypeptide, e.g., a multimeric polypeptide; large polypeptide; polypeptide derivatized in vitro; an exogenous polypeptide that may have toxicity to, or which is not expressed efficiently in, the erythroid cells. Click chemistry and other conjugation methods for functionalizing erythroid cells is described in International Application No. PCT/US2018/000042, which claims priority to U.S. Provisional Application No. 62/460,589, filed Feb. 17, 2017 and U.S. Provisional Application No. 62/542,142, filed Jul. 8, 2017.

[0688] Thus, in some embodiments, an erythroid cell described herein comprises many as, at least, more than, or about 5,000, 10,000, 50,000, 100,000, 200,000, 300,000, 400,000, 500,000 coupling reagents per cell. In some embodiments, the erythroid cells are made by a method comprising a) coupling a first coupling reagent to an erythroid cell, thereby making a pharmaceutical preparation, product, or intermediate. In an embodiment, the method further comprises: b) contacting the cell with an exogenous polypeptide coupled to a second coupling reagent e.g., under conditions suitable for reaction of the first coupling reagent with the second coupling reagent. In embodiments, two or more exogenous polypeptides are coupled to the cell (e.g., using click chemistry). In embodiments, a first exogenous polypeptide is coupled to the cell (e.g., using click chemistry) and a second exogenous polypeptide comprises a polypeptide expressed from an exogenous nucleic acid.

[0689] In some embodiments, one or more coupling reagents are used to couple the one or more exogenous polypeptides to the erythroid cell described herein. In some embodiments, two or more coupling reagents are used to couple the two or more exogenous polypeptides to the erythroid cell described herein. In some embodiments, two or more exogenous polypeptides are coupled to the cell (e.g., using click chemistry) using the same coupling reagent. In some embodiments, two or more exogenous polypeptides are coupled to the cell (e.g., using click chemistry) using different coupling reagents. In some embodiments, a first exogenous polypeptide is coupled to the cell (e.g., using click chemistry) using a first coupling reagent, and a second exogenous polypeptide is coupled to the cell (e.g., using click chemistry) using a second coupling reagent. In some embodiments, three or more exogenous polypeptides are coupled to the cell (e.g., using click chemistry) using the same coupling reagent. In some embodiments, three or more exogenous polypeptides are coupled to the cell (e.g., using click chemistry) using different coupling reagents. In some embodiments, a first exogenous polypeptide is coupled to the cell (e.g., using click chemistry) using a first coupling reagent, a second exogenous polypeptide is coupled to the cell (e.g., using click chemistry) using the first coupling reagent, and a third exogenous polypeptide is coupled to the cell (e.g., using click chemistry) using a second coupling reagent. In some embodiments, a first exogenous polypeptide is coupled to the cell (e.g., using click chemistry) using a first coupling reagent, a second exogenous polypeptide is coupled to the cell (e.g., using click chemistry) using a second coupling reagent, and a third exogenous polypeptide is coupled to the cell (e.g., using click chemistry) using the first coupling reagent. In some embodiments, a first exogenous polypeptide is coupled to the cell (e.g., using click chemistry) using a first coupling reagent, a second exogenous polypeptide is coupled to the cell (e.g., using click chemistry) using the a second coupling reagent, and a third exogenous polypeptide is coupled to the cell (e.g., using click chemistry) using the second coupling reagent.

[0690] In an embodiment, one or more coupling reagents are used to couple the one or more exogenous polypeptides to the erythroid cell described herein, wherein the erythroid cell is a human erythroid cell. In some embodiments, the erythroid cell is a human cell, and two or more coupling agents are used to couple the two or more exogenous polypeptides to the erythroid cell. In some embodiments, the erythroid cell is a human cell, and two or more exogenous polypeptides are coupled to the cell (e.g., using click chemistry) using the same coupling reagent. In some embodiments, the erythroid cell is a human cell, and two or more exogenous polypeptides are coupled to the cell (e.g., using click chemistry) using different coupling reagents. In some embodiments, the erythroid cell is a human cell, and a first exogenous polypeptide is coupled to the cell (e.g., using click chemistry) using a first coupling reagent, and a second exogenous polypeptide is coupled to the cell (e.g., using click chemistry) using a second coupling reagent. In some embodiments, the erythroid cell is a human cell, and three or more exogenous polypeptides are coupled to the cell (e.g., using click chemistry) using the same coupling reagent. In some embodiments, the erythroid cell is a human cell, and three or more exogenous polypeptides are coupled to the cell (e.g., using click chemistry) using the different coupling reagents. In some embodiments, the erythroid cell is a human cell, and a first exogenous polypeptide is coupled to the cell (e.g., using click chemistry) using a first coupling reagent, a second exogenous polypeptide is coupled to the cell (e.g., using click chemistry) using the first coupling reagent, and a third exogenous polypeptide is coupled to the cell (e.g., using click chemistry) using a second coupling reagent. In some embodiments, the erythroid cell is a human cell, and a first exogenous polypeptide is coupled to the cell (e.g., using click chemistry) using a first coupling reagent, a second exogenous polypeptide is coupled to the cell (e.g., using click chemistry) using a second coupling reagent, and a third exogenous polypeptide is coupled to the cell (e.g., using click chemistry) using the first coupling reagent. In some embodiments, the erythroid cell is a human cell, and a first exogenous polypeptide is coupled to the cell (e.g., using click chemistry) using a first coupling reagent, a second exogenous polypeptide is coupled to the cell (e.g., using click chemistry) using a second coupling reagent, and a third exogenous polypeptide is coupled to the cell (e.g., using click chemistry) using the second coupling reagent.

[0691] In embodiments, it is an advantage of the present disclosure to employ two different coupling reagents to click three or more exogenous polypeptides to an erythroid cell, and in particular to a human erythroid cell. Without being bound by theory, the present disclosure contemplates that in erythroid cells comprising three or more exogenous polypeptides coupled to the cell (e.g. using click chemistry) using different coupling reagents, that competition between the exogenous polypeptides for the coupling reagents is reduced, and as a result the copy numbers of the exogenous polypeptides are maximized.

[0692] In some embodiments, the coupling reagent comprises an azide coupling reagent. In some embodiments, the azide coupling reagent comprises an azidoalkyl moiety, azidoaryl moiety, or an azidoheteroaryl moiety. Exemplary azide coupling reagents include 3-azidopropionic acid sulfo-NHS ester, azidoacetic acid NHS ester, azido-PEG-NHS ester, azidopropylamine, azido-PEG-amine, azido-PEG-maleimide, bis-sulfone-PEG-azide, or a derivative thereof. Coupling reagents may also comprise an alkene moiety, e.g., a transcycloalkene moiety, an oxanorbornadiene moiety, or a tetrazine moiety. Additional coupling reagents can be found in Click Chemistry Tools (https://clickchemistrytools.com/) or Lahann, J (ed) (2009) Click Chemistry for Biotechnology and Materials Science, each of which is incorporated herein by reference in its entirety.

[0693] In another embodiment, the antigenic polypeptide is attached to the cell, e.g., an erythroid cell, via a covalent attachment to generate an aAPC comprising an erythroid cell presenting one or more exogenous antigenic polypeptides (e.g. a first exogenous antigenic polypeptide, or a first antigenic polypeptide and a second exogenous antigenic polypeptide). For example, the antigenic polypeptide may be derivatized and bound to the erythroid cell or platelet using a coupling compound containing an electrophilic group that will react with nucleophiles on the erythroid cell or platelet to form the interbonded relationship. Representative of these electrophilic groups are αβ unsaturated carbonyls, alkyl halides and thiol reagents such as substituted maleimides. In addition, the coupling compound can be coupled to an antigenic polypeptide via one or more of the functional groups in the polypeptide such as amino, carboxyl and tryosine groups. For this purpose, coupling compounds should contain free carboxyl groups, free amino groups, aromatic amino groups, and other groups capable of reaction with enzyme functional groups. Highly charged antigenic polypeptides can also be prepared for immobilization on, e.g., erythroid cells or platelets through electrostatic bonding to generate aAPCs. Examples of these derivatives would include polylysyl and polyglutamyl enzymes.

[0694] The choice of the reactive group embodied in the derivative depends on the reactive conditions employed to couple the electrophile with the nucleophilic groups on the erythroid cell or platelet for immobilization. A controlling factor is the desire not to inactivate the coupling agent prior to coupling of the exogenous polypeptide immobilized by the attachment to the erythroid cell or platelet. Such coupling immobilization reactions can proceed in a number of ways. Typically, a coupling agent can be used to form a bridge between the exogenous polypeptide and the erythroid cell or platelet. In this case, the coupling agent should possess a functional group such as a carboxyl group which can be caused to react with the exogenous polypeptide. One way of preparing the exogenous polypeptide for conjugation includes the utilization of carboxyl groups in the coupling agent to form mixed anhydrides which react with the exogenous polypeptide, in which use is made of an activator which is capable of forming the mixed anhydride. Representative of such activators are isobutylchloroformate or other chloroformates which give a mixed anhydride with coupling agents such as 5,5′-(dithiobis(2-nitrobenzoic acid) (DTNB), p-chloromercuribenzoate (CMB), or m-maleimidobenzoic acid (MBA). The mixed anhydride of the coupling agent reacts with the exogenous polypeptide to yield the reactive derivative which in turn can react with nucleophilic groups on the erythroid cell or platelet to immobilize the exogenous polypeptide.

[0695] Functional groups on an antigenic polypeptide, such as carboxyl groups can be activated with carbodiimides and the like activators. Subsequently, functional groups on the bridging reagent, such as amino groups, will react with the activated group on the exogenous polypeptide to form the reactive derivative. In addition, the coupling agent should possess a second reactive group which will react with appropriate nucleophilic groups on the erythroid cell or platelet to form the bridge. Typical of such reactive groups are alkylating agents such as iodoacetic acid, αβ unsaturated carbonyl compounds, such as acrylic acid and the like, thiol reagents, such as mercurials, substituted maleimides and the like.

[0696] Alternatively, functional groups on the antigenic polypeptide can be activated so as to react directly with nucleophiles on, e.g., erythroid cells or platelets to obviate the need for a bridge-forming compound. For this purpose, use is made of an activator such as Woodward's Reagent K or the like reagent which brings about the formation of carboxyl groups in the exogenous polypeptide into enol esters, as distinguished from mixed anhydrides. The enol ester derivatives of exogenous polypeptides subsequently react with nucleophilic groups on, e.g., an erythroid cell or platelet to effect immobilization of the antigenic polypeptide, thereby creating an aAPC.

[0697] In some embodiments, the aAPC comprising an erythroid cell presenting (e.g. comprising on the cell surface) one or more exogenous antigenic polypeptides is generated by contacting an erythroid cell with an antigenic polypeptide and optionally a payload, wherein contacting does not include conjugating the antigenic polypeptide to the erythroid cell using an attachment site comprising Band 3 (CD233), aquaporin-1, Glut-1, Kidd antigen, RhAg/Rli50 (CD241), Rli (CD240), Rh30CE (CD240CE), Rh30D (CD240D), Kx, glycophorin B (CD235b), glycophorin C (CD235c), glycophorin D (CD235d), Kell (CD238), Duffy/DARCi (CD234), CR1 (CD35), DAF (CD55), Globoside, CD44, ICAM-4 (CD242), Lu/B-CAM (CD239), XG1/XG2 (CD99), EMMPRIN/neurothelin (CD147), JMH, Glycosyltransferase, Cartwright, Dombrock, C4A/CAB, Scianna, MER2, stomatin, BA-1 (CD24), GPIV (CD36), CD108, CD139, or H antigen (CD173). In some embodiments, the erythroid cell is an enucleated cell. In some embodiments, the erythroid cell is a nucleated cell.

[0698] In some embodiments, the aAPC comprises an erythroid cell presenting (e.g. comprising on the cell surface) one or more exogenous antigenic polypeptides, wherein the one or more exogenous antigenic polypeptides are enzymatically conjugated.

[0699] In specific embodiments, the antigenic polypeptide can be conjugated to the surface of, e.g., an erythroid cell or platelet by various chemical and enzymatic means, including but not limited to chemical conjugation with bifunctional cross-linking agents such as, e.g., an NHS ester-maleimide heterobifunctional crosslinker to connect a primary amine group with a reduced thiol group. These methods also include enzymatic strategies such as, e.g., transpeptidase reaction mediated by a sortase enzyme to connect one polypeptide containing the acceptor sequence LPXTG (SEQ ID NO: 6) or LPXTA (SEQ ID NO: 7) with a polypeptide containing the N-terminal donor sequence GGG, see e.g., Swee et al., PNAS 2013. The methods also include combination methods, such as e.g., sortase-mediated conjugation of Click Chemistry handles (an azide and an alkyne) on the antigen and the cell, respectively, followed by a cyclo-addition reaction to chemically bond the antigen to the cell, see e.g., Neves et al., Bioconjugate Chemistry, 2013. Sortase-mediated modification of proteins is described in International Application No. PCT/US2014/037545 and International Application No. PCT/US2014/037554, both of which are incorporated by reference in their entireties herein.

[0700] In some embodiments, a protein is modified by the conjugation of a sortase substrate comprising an amino acid, a peptide, a protein, a polynucleotide, a carbohydrate, a tag, a metal atom, a contrast agent, a catalyst, a non-polypeptide polymer, a recognition element, a small molecule, a lipid, a linker, a label, an epitope, an antigen, a therapeutic agent, a toxin, a radioisotope, a particle, or moiety comprising a reactive chemical group, e.g., a click chemistry handle.

[0701] If desired, a catalytic bond-forming polypeptide domain can be expressed on or in e.g., an erythroid cell or platelet, either intracellularly or extracellularly. Many catalytic bond-forming polypeptides exist, including transpeptidases, sortases, and isopeptidases, including those derived from Spy0128, a protein isolated from Streptococcus pyogenes.

[0702] In some embodiments, any of the polypeptides described herein are not conjugated to the cell using a sortase

[0703] It has been demonstrated that splitting the autocatalytic isopeptide bond-forming subunit (CnaB2 domain) of Spy0128 results in two distinct polypeptides that retain catalytic activity with specificity for each other. The polypeptides in this system are termed SpyTag and SpyCatcher. Upon mixing, SpyTag and SpyCatcher undergo isopeptide bond formation between Asp117 on SpyTag and Lys31 on SpyCatcher (Zakeri and Howarth, JACS 2010, 132:4526). The reaction is compatible with the cellular environment and highly specific for protein/peptide conjugation (Zakeri, B.; Fierer, J. O.; Celik, E.; Chittock, E. C.; Schwarz-Linek, U.; Moy, V. T.; Howarth, M. Proc. Natl. Acad. Sci. U.S.A. 2012, 109, E690-E697). SpyTag and SpyCatcher has been shown to direct post-translational topological modification in elastin-like protein. For example, placement of SpyTag at the N-terminus and SpyCatcher at the C-terminus directs formation of circular elastin-like proteins (Zhang et al, Journal of the American Chemical Society, 2013).

[0704] The components SpyTag and SpyCatcher can be interchanged such that a system in which molecule A is fused to SpyTag and molecule B is fused to SpyCatcher is functionally equivalent to a system in which molecule A is fused to SpyCatcher and molecule B is fused to SpyTag. For the purposes of this document, when SpyTag and SpyCatcher are used, it is to be understood that the complementary molecule could be substituted in its place.

[0705] A catalytic bond-forming polypeptide, such as a SpyTag/SpyCatcher system, can be used to attach the antigenic polypeptide to the surface of, e.g., an erythroid cell, such as an engineered erythroid cell, to generate an aAPC. The SpyTag polypeptide sequence can be expressed on the extracellular surface of the erythroid cell. The SpyTag polypeptide can be, for example, fused to the N terminus of a type-1 or type-3 transmembrane protein, e.g., glycophorin A, fused to the C terminus of a type-2 transmembrane protein, e.g., Kell, inserted in-frame at the extracellular terminus or in an extracellular loop of a multi-pass transmembrane protein, e.g., Band 3, fused to a GPI-acceptor polypeptide, e.g., CD55 or CD59, fused to a lipid-chain-anchored polypeptide, or fused to a peripheral membrane protein. The nucleic acid sequence encoding the SpyTag fusion can be expressed within an aAPC. An antigenic polypeptide can be fused to SpyCatcher. The nucleic acid sequence encoding the SpyCatcher fusion can be expressed and secreted from the same erythroid cell that expresses the SpyTag fusion. Alternatively, the nucleic acid sequence encoding the SpyCatcher fusion can be produced exogenously, for example in a bacterial, fungal, insect, mammalian, or cell-free production system. Upon reaction of the SpyTag and SpyCatcher polypeptides, a covalent bond will be formed that attaches the antigenic polypeptide to the surface of the erythroid cell to form an aAPC. An erythroid cell comprising the antigenic polypeptide fusion is an example of an aAPC that comprises a conjugated antigenic polypeptide.

[0706] In some embodiments, the SpyTag polypeptide may be expressed as a fusion to the N terminus of glycophorin A under the control of the Gatal promoter in an erythroid cell. An exogenous polypeptide (e.g., exogenous antigenic polypeptides, exogenous antigen-presenting polypeptides, exogenous costimulatory polypeptides, exogenous coinhibitory polypeptides, exogenous amino acid-depleting polypeptides, and exogenous Treg costimulatory polypeptides), fused to the SpyCatcher polypeptide sequence can be expressed under the control of the Gatal promoter in the same erythroid cell. Upon expression of both fusion polypeptides, an isopeptide bond will be formed between the SpyTag and SpyCatcher polypeptides, forming a covalent bond between the erythroid cell surface and the exogenous polypeptide.

[0707] In another embodiment, the SpyTag polypeptide may be expressed as a fusion to the N terminus of glycophorin A under the control of the Gatal promoter in an erythroid cell. An exogenous polypeptide (e.g., exogenous antigenic polypeptides, exogenous antigen-presenting polypeptides, exogenous costimulatory polypeptides, exogenous coinhibitory polypeptides, exogenous amino acid-depleting polypeptides, and exogenous Treg costimulatory polypeptides) fused to the SpyCatcher polypeptide sequence can be expressed in a suitable mammalian cell expression system, for example HEK293 cells. Upon expression of the SpyTag fusion polypeptide on the erythroid cell, the SpyCatcher fusion polypeptide can be brought in contact with the cell. Under suitable reaction conditions, an isopeptide bond will be formed between the SpyTag and SpyCatcher polypeptides, forming a covalent bond between the erythroid cell surface and the antigenic polypeptide. An erythroid cell comprising the antigenic polypeptide fusion is an example of an aAPC that comprises a conjugated antigenic polypeptide.

[0708] Other molecular fusions may be formed between exogenous polypeptides and include direct or indirect conjugation. The exogenous polypeptides may be directly conjugated to each other or indirectly through a linker. The linker may be a peptide, a polymer, an aptamer, or a nucleic acid. The polymer may be, e.g., natural, synthetic, linear, or branched. Antigenic polypeptides can comprise a heterologous fusion protein that comprises a first polypeptide and a second polypeptide with the fusion protein comprising the polypeptides directly joined to each other or with intervening linker sequences and/or further sequences at one or both ends. The conjugation to the linker may be through covalent bonds or ionic bonds.

[0709] In certain embodiments, the polypeptide is loaded into the aAPC comprising an erythroid cell. In some embodiments, the polypeptide is loaded into the aAPC comprising an enucleated cell. In some embodiments, the polypeptide is loaded into the aAPC comprising a nucleated cell. In some embodiments, aAPCs comprising erythroid or enucleated cells are generated by loading, e.g., erythroid cells or platelets with one or more exogenous polypeptides, such that the one or more exogenous polypeptides are internalized within the erythroid cells or platelets. Optionally, the erythroid cells or platelets may additionally be loaded with a payload, such as, e.g., a therapeutic agent.

[0710] A number of methods may be used to load, e.g., erythroid cells or platelets with an exogenous polypeptide. Suitable methods include, for example, hypotonic lysis, hypotonic dialysis, osmosis, osmotic pulsing, osmotic shock, ionophoresis, electroporation, sonication, microinjection, calcium precipitation, membrane intercalation, lipid mediated transfection, detergent treatment, viral infection, diffusion, receptor mediated endocytosis, use of protein transduction domains, particle firing, membrane fusion, freeze-thawing, mechanical disruption, and filtration. Any one such method or a combination thereof may be used to generate the aAPCs comprising an engineered erythroid cell presenting (e.g. comprising on the cell surface) one or more exogenous polypeptides (e.g., exogenous antigenic polypeptides, exogenous antigen-presenting polypeptides, exogenous costimulatory polypeptides, exogenous coinhibitory polypeptides, exogenous amino acid-depleting polypeptides, and exogenous Treg costimulatory polypeptides) described herein.

[0711] For hypotonic lysis, e.g., erythroid cell are exposed to low ionic strength buffer causing them to burst. The exogenous polypeptide distributes within the cells. Erythroid cell, specifically red blood cells may be hypotonically lysed by adding 30-50 fold volume excess of 5 mM phosphate buffer (pH 8) to a pellet of isolated red blood cells. The resulting lysed cell membranes are isolated by centrifugation. The pellet of lysed red blood cell membranes is resuspended and incubated in the presence of the exogenous polypeptide in a low ionic strength buffer, e.g., for 30 min. Alternatively, the lysed red blood cell membranes may be incubated with the exogenous polypeptide for as little as one minute or as long as several days, depending upon the best conditions determined to efficiently load the erythroid cells.

[0712] Alternatively, erythroid cells, specifically red blood cells (e.g. erythrocytes) may be loaded with an exogenous polypeptide using controlled dialysis against a hypotonic solution to swell the cells and create pores in the cell membrane (See, e.g., U.S. Pat. Nos. 4,327,710; 5,753,221; and 6,495,351). For example, a pellet of isolated red blood cells is resuspended in 10 mM HEPES, 140 mM NaCl, 5 mM glucose pH 7.4 and dialyzed against a low ionic strength buffer containing 10 mM NaH₂PO₄, 10 mM NaHCO₃, 20 mM glucose, and 4 mM MgCl₂, pH 7.4. After 30-60 min, the red blood cells are further dialyzed against 16 mM NaH₂PO₄, pH 7.4 solution containing the exogenous polypeptide for an additional 30-60 min. All of these procedures may be advantageously performed at a temperature of 4° C. In some instances, it may be beneficial to load a large quantity of erythroid cells, specifically red blood cells by a dialysis approach and a specific apparatus designed for this purpose may be used (See, e.g., U.S. Pat. Nos. 4,327,710, 6,139,836 and 6,495,351 B2).

[0713] The loaded erythroid cells, specifically red blood cells can be resealed by gentle heating in the presence of a physiological solution such as, for example, 0.9% saline, phosphate buffered saline, Ringer's solution, cell culture medium, blood plasma or lymphatic fluid. For example, well-sealed membranes may be generated by treating the disrupted erythroid cells, specifically red blood cells for 1-2 min in 150 mM salt solution of, for example, 100 mM phosphate (pH 8.0) and 150 mM sodium chloride at a temperature of 60° C. Alternatively, the cells may be incubated at a temperature of 25-50° C. for 30 min to 4 h (See, e.g., U.S. Patent Application 2007/0243137 A1). Alternatively, the disrupted red blood cells may be resealed by incubation in 5 mM adenine, 100 mM inosine, 2 mM ATP, 100 mM glucose, 100 mM Na-pyruvate, 4 mM MgCl2, 194 mM NaCl, 1.6 M KCl, and 35 mM NaH₂PO₄, pH 7.4 at a temperature of 37° C. for 20-30 min (See, e.g., U.S. Pat. No. 5,753,221).

[0714] For electroporation, e.g., erythroid cells or platelets are exposed to an electrical field which causes transient holes in the cell membrane, allowing the one or more exogenous polypeptides (e.g. exogenous antigenic polypeptides, exogenous antigen-presenting polypeptides, exogenous costimulatory polypeptides, exogenous T cell expansion polypeptides, exogenous co-inhibitory polypeptides, exogenous proliferation inhibitors, exogenous amino acid-depleting polypeptides, exogenous regulatory T cell expansion polypeptides, exogenous placeholder polypeptides) to diffuse into the cell (See, e.g., U.S. Pat. No. 4,935,223). Erythroid cells, specifically red blood cells, for example, are suspended in a physiological and electrically conductive media such as platelet-free plasma to which the one or more exogenous polypeptides are added. The mixture in a volume ranging from 0.2 to 1.0 ml is placed in an electroporation cuvette and cooled on ice for 10 min. The cuvette is placed in an electroporation apparatus such as, for example, an ECM 830 (from BTX Instrument Division, Harvard Apparatus, Holliston, Mass.). The cells are electroporated with a single pulse of approximately 2.4 milliseconds in length and a field strength of approximately 2.0 kV/cm. Alternatively, electroporation of erythroid cells, specifically red blood cells may be carried out using double pulses of 2.2 kV delivered at 0.25.mu.F using a Bio-Rad Gene Pulsar apparatus (Bio-Rad, Hercules, Calif., USA) to achieve a loading capacity of over 60% (Flynn et al., Cancer Lett. 82:225-229 (1994)). The cuvette is returned to the ice bath for 10-60 min and then placed in a 37° C. water bath to induce resealing of the cell membrane. Any suitable electroporation method may be used to generate the aAPCs described herein.

[0715] For sonication, erythroid cells are, for example, exposed to high intensity sound waves, causing transient disruption of the cell membrane allowing the one or more exogenous polypeptides (e.g., exogenous antigenic polypeptides, exogenous antigen-presenting polypeptides, exogenous costimulatory polypeptides, exogenous coinhibitory polypeptides, exogenous amino acid-depleting polypeptides, and exogenous Treg costimulatory polypeptides) to diffuse into the cell. Any suitable sonication method may be used to generate the aAPCs described herein.

[0716] For detergent treatment, erythroid cells, for example, are treated with a mild detergent which transiently compromises the cell membrane by creating holes through which the one or more exogenous polypeptides (e.g., exogenous antigenic polypeptides, exogenous antigen-presenting polypeptides, exogenous costimulatory polypeptides, exogenous coinhibitory polypeptides, exogenous amino acid-depleting polypeptides, and exogenous Treg costimulatory polypeptides) may diffuse. After cells are loaded, the detergent is washed from the cells. For example, the detergent may be saponin. Any suitable detergent treatment method may be used to generate the aAPCs described herein.

[0717] For receptor mediated endocytosis, erythroid cells, for example, may have a surface receptor which upon binding of the one or more exogenous polypeptides (e.g., exogenous antigenic polypeptides, exogenous antigen-presenting polypeptides, exogenous costimulatory polypeptides, exogenous coinhibitory polypeptides, exogenous amino acid-depleting polypeptides, and exogenous Treg costimulatory polypeptides) induces internalization of the receptor and the associated exogenous polypeptides. Any suitable endocytosis method may be used to generate an aAPC comprising an erythroid cell presenting (e.g. comprising on the cell surface) one or more exogenous polypeptides, as described herein.

[0718] For mechanical firing, erythroid cells, for example, may be bombarded with the one or more exogenous polypeptides (e.g., exogenous antigenic polypeptides, exogenous antigen-presenting polypeptides, exogenous costimulatory polypeptides, exogenous coinhibitory polypeptides, exogenous amino acid-depleting polypeptides, and exogenous Treg costimulatory polypeptides) attached to a heavy or charged particle such as, for example, gold microcarriers and are mechanically or electrically accelerated such that they traverse the cell membrane. Microparticle bombardment may be achieved using, for example, the Helios Gene Gun (from, e.g., Bio-Rad, Hercules, Calif., USA). Any suitable microparticle bombardment method may be used to generate the aAPCs described herein.

[0719] For filtration, erythroid cells or platelets and the exogenous polypeptides may be forced through a filter of pore size smaller than the cell causing transient disruption of the cell membrane and allowing the exogenous polypeptides to enter the cell. Any suitable filtration method may be used to generate the aAPCs comprising engineered erythroid cells presenting (e.g. comprising on the cell surface) exogenous polypeptides as described herein.

[0720] For freeze thawing, erythroid cells are subjected to several freeze thaw cycles, resulting in cell membrane disruption (See, e.g., U.S. Patent Application 2007/0243137 A1). In this instance, a pellet of packed red blood cells (0.1-1.0 ml) is mixed with an equal volume (0.1-1.0 ml) of an isotonic solution (e.g., phosphate buffered saline) containing the one or more exogenous polypeptides. The red blood cells are frozen by immersing the tube containing the cells and one or more exogenous polypeptides into liquid nitrogen. Alternatively, the cells may be frozen by placing the tube in a freezer at −20° C. or −80° C. The cells are then thawed in, e.g., a 23° C. water bath and the cycle repeated if necessary to increase loading. Any suitable freeze-thaw method may be used to generate the aAPCs comprising engineered erythroid cells presenting (e.g. comprising on the cell surface) exogenous polypeptides as described herein.

[0721] Exogenous polypeptides can be detected on the aAPC. The presence of the exogenous polypeptide can be validated and quantified using standard molecular biology methods, e.g., Western blotting or FACS analysis. Exogenous polypeptides present in the intracellular environment may be quantified upon cell lysis or using fluorescent detection.

[0722] In some embodiments of the above aspects and embodiments, the erythroid cell is an enucleated cell. In some embodiments of the above aspects and embodiments, the erythroid cell is a nucleated cell.

[0723] Vehicles for Polypeptides Described Herein

[0724] In one aspect, one or more polypeptides described herein are loaded onto, attached (e.g., immobilized or conjugated) to the surface of, and/or enclosed in a non-cellular delivery vehicle. The non-cellular delivery vehicle can be, for example, a nanolipidgel, a polymeric particle, an agarose particle, a latex particle, a silica particle, a liposome, or a multilamellar vesicles. In some embodiments, the non-cellular delivery vehicle comprises or consists of a nanoparticle of from about 1 nm to about 900 nm in diameter. In some embodiments, the non-cellular delivery vehicle comprises an average diameter of from about 0.1 to about 20 microns (such as from about 0.5 microns to about 10 microns, e.g., about 5 microns or less (e.g., about 2.5 to about 5 microns)). In some embodiments, the non-cellular delivery vehicle comprises an average diameter of from about 1 μm to about 10 μm. In some embodiments, the non-cellular delivery vehicle comprises a biodegradable polymer. In some embodiments, the non-cellular delivery vehicle comprises a natural polymer. In some embodiments, the non-cellular delivery vehicle comprises a synthetic polymer. Representative polymers include, but are not limited to, a poly(hydroxy acid), a polyhydroxyalkanoate, a polycaprolactone, a polycarbonate, a polyamide, a polyesteramide, poly(acrylamide), poly(ester), poly(alkylcyanoacrylates), poly(lactic acid) (PLA), poly(glycolic acids) (PGA), and poly(D,L-lactic-co-glycolic acid) (PLGA), and combinations thereof. In some embodiments, the non-cellular delivery vehicle comprises agarose, latex, or polystyrene. One or more of the polypeptides described herein can be conjugated to a non-cellular delivery vehicle using standard methods known in the art (see, e.g., Ulbrich et al. (2016) Chem Rev. 116(9): 5338-431). Conjugation can be either covalent or non-covalent. For example, in embodiments in which the non-cellular delivery vehicle is a liposome, a polypeptide described herein may be attached to the liposome via a polyethylene glycol (PEG) chain. Conjugation of a polypeptide to a liposome can also involve thioester bonds, for example by reaction of thiols and maleimide groups. Cross-linking agents can be used to create sulfhydryl groups for attachment of polypeptides to non-cellular delivery vehicles (see, e.g., Paszko and Senge (2012) Curr. Med. Chem. 19(31): 5239-77). In some embodiments, the non-cellular delivery vehicles comprising one or more of the polypeptides described herein may be used in any of therapeutic methods provided herein.

### IV. Methods of Using Artificial Antigen Presenting Cells

[0725] The present disclosure contemplates various methods of using the aAPCs described herein. As would be understood by one skilled in the art, based upon the disclosure provided herein, the dose and timing of administration of the aAPCs can be specifically tailored for each application described herein. More specifically, where it is desirable to provide stimulation to a T cell using certain molecules expressed by an aAPC, or several aAPCs, followed by stimulation using another aAPC, or several aAPCs, expressing a different, even if overlapping, set of molecules, then a combination of cis and trans approaches can be utilized. In essence, the aAPCs of the disclosure, and the methods disclosed herein, provide an almost limitless number of variations and the disclosure is not limited in any way to any particular combination or approach. The skilled artisan, armed with the teachings provided herein and the knowledge available in the art, can readily determine the desired approach for each particular T cell.

[0726] In one aspect, the disclosure features a method of activating an antigen-specific T cell, the method comprising contacting the T cell with an aAPC as described herein, thereby activating the antigen-specific T cell. In some embodiments, activating the antigen-specific T cell includes activating an antigen-specific T cell with a central memory phenotype. In certain embodiments, activating an antigen-specific T cell includes promoting the expansion of memory T cells. In other embodiments, activating an antigen-specific T cell includes differentiating or de-differentiating T cells. For example, long-lived memory CD8 T cells are derived from a subset of effector T cells through a process of de-differentiation.

[0727] In another aspect, the disclosure features a method of suppressing activity of a T cell, the method comprising contacting the T cell with an aAPC engineered to suppress T cell activity, thereby suppressing activity of the T cell.

[0728] In another aspect, the invention features a method for activating a Treg cell, the method comprising contacting the Treg cell with an aAPC engineered to activate a regulatory T cell (Treg), thereby activating the Treg cell.

[0729] In another aspect, the disclosure features a method for inducing proliferation of a T cell expressing a receptor molecule, the method comprising contacting the T cell with an aAPC as described herein, wherein the costimulatory polypeptide specifically binds with the receptor molecule, thereby inducing proliferation of said T cell.

[0730] The disclosure also encompasses a method for specifically inducing proliferation of a T cell expressing a known co-stimulatory molecule. The method comprises contacting a population of T cells comprising at least one T cell expressing the known co-stimulatory molecule with an aAPC engineered to present a ligand of the co-stimulatory molecule. As disclosed elsewhere herein, where an aAPC expresses at least one co-stimulatory ligand that specifically binds with a co-stimulatory molecule on a T cell, binding of the co-stimulatory molecule with its cognate co-stimulatory ligand induces proliferation of the T cell. Thus, the T cell of interest is induced to proliferate without having to first purify the cell from the population of cells. Also, this method provides a rapid assay for determining whether any cells in the population are expressing a particular costimulatory molecule of interest, since contacting the cells with the aAPC will induce proliferation and detection of the growing cells thereby identifying that a T cell expressing a costimulatory molecule of interest was present in the sample. In this way, any T cell of interest where at least one costimulatory molecule on the surface of the cell is known, can be expanded and isolated.

[0731] The disclosure also includes a method for specifically expanding a T cell population subset. More particularly, the method comprises contacting a population of T cells comprising at least one T cell of a subset of interest with an aAPC capable of expanding that T cell, or at least an aAPC expressing at least one costimulatory ligand that specifically binds with a cognate costimulatory molecule on the surface of the T cell. Binding of the co-stimulatory molecule with its binding partner co-stimulatory ligand induces proliferation of the T cell, thereby specifically expanding a T cell population subset. One skilled in the art would understand, based upon the disclosure provided herein, that T cell subsets include T helper (T_{H1} and T_{H2}) CD4 expressing, cytotoxic T lymphocyte (CTL) (Tc1 or Tc2) T regulatory (TR_{EG}), T_{C/S}, naive, memory, central memory, effector memory, and γΔT cells. Therefore, cell populations enriched for a particular T cell subset can be readily produced using the method of the disclosure.

[0732] In certain embodiments, T cells are expanded to between about 100 and about 1,000,000 fold, or between about 1,000 and about 1,000,000 fold, e.g., between 1,000 and about 100,000 fold.

[0733] The fitness of T cells after ex vivo expansion is an excellent predicator of their ability to function in vivo. Thus, in certain embodiments, the ability of the aAPCs to induce the key cell survival gene Bcl-xL is also measured. The percentage of apoptotic cells in a culture during the expansion process is used to determine whether any of the cell based aAPCs confer a particular survival advantage to the expanded T cells. Additionally, the telomere length of cells after ex vivo expansion can be measured to determine if a particular aAPC is more effective in preserving the replicative potential of the cells it expands.

[0734] The disclosure also includes a method for identifying a co-stimulatory ligand, or combination thereof, which specifically induces activation of a T cell subset. Briefly, the method comprises contacting a population of T cells with an aAPC presenting (e.g. comprising on the cell surface) at least one co-stimulatory ligand, and comparing the level of proliferation of the T cell subset contacted with the aAPC with the level of proliferation of an otherwise identical T cell subset not contacted with the aAPC. A greater level of proliferation of the T cell subset contacted with the aAPC compared with the level of proliferation of the otherwise identical T cell subset which was not contacted with the aAPC is an indication that at the co-stimulatory ligand specifically induces activation of the T cell subset to which that T cell belongs.

[0735] The method permits the identification of a costimulatory ligand that specifically expands a T cell subset where it is not previously known which factor(s) expand that T cell subset. The skilled artisan would appreciate that in order to minimize the number of screenings, it is preferable to transduce as many nucleic acids encoding costimulatory ligands such that the number of assays can be reduced. Further, the method allows, by combining the various proteins (e.g., stimulatory ligand, costimulatory ligand, antigen, cytokine, and the like), to assess which combination(s) of factors will make the most effective aAPC, or combination of aAPCs, to expand the T cell subset. In this way, the various requirements for growth and activation for each T cell subset can be examined. Further, to evaluate T cell expansion, CFSE staining can be used. aAPCs are mixed with CD8 T cells (e.g. from a subject suffering from a disease or disorder, such an autoimmune disease, an infectious disease or cancer). To compare the initial rate of cell expansion, the cells are subject to CFSE staining to determine how well each aAPC induced the proliferation of all T cells. CFSE staining provides a much more quantitative endpoint and allows simultaneous phenotyping of the expanded cells. Every day after stimulation, an aliquot of cells is removed from each culture and analyzed by flow cytometry. CFSE staining makes cells highly fluorescent. Upon cell division, the fluorescence is halved and thus the more times a cell divides the less fluorescent it becomes. The ability of each aAPC to induce T cell proliferation is quantitated by measuring the number of cells that divided once, twice, three times and so on. The aAPC that induces the most number of cell divisions at a particular time point is deemed as the most potent expander.

[0736] To determine how well these aAPCs promote long-term growth of T cells, cell growth curves are generated. These experiments are set up exactly as the CFSE experiments, but no CFSE is used. Every 2-3 days of culture, T cells are removed from the respective cultures and counted using a Coulter counter which measures how many cells are present and the mean volume of the cells. The mean cell volume is the best predicator of when to restimulate the cells. In general, when T cells are properly stimulated they triple their cell volume. When this volume is reduced to more than about half of the initial blast, it may be necessary to restimulate the T cells to maintain a log linear expansion (Levine et al., 1996, Science 272:1939-1943; Levine et al., 1997, J. Immunol. 159:5921-5930). The time it takes each aAPC to induce 20 population doublings is calculated. The relative differences of each aAPC to induce this level of T cell expansion is an important criteria on which a particular aAPC is used to move forward to clinical trials.

[0737] The phenotypes of the cells expanded by each aAPC are characterized to determine whether a particular subset is preferentially expanded. Prior to each restimulation, a phenotype analysis of the expanding T cell populations is performed to define the differentiation state of the expanded T cells using the CD27 and CD28 definitions proposed by Appay et al. (2002, Nature Med. 8, 379-385) and CCR7 definitions proposed by Sallusto et al. (1999, Nature 401:708-712). Perforin and Granzyme B intracellular staining are used to perform a gross measure to estimate cytolytic potential.

[0738] In one aspect, the method comprises contacting various aAPCs with the T cell subset without first characterizing the costimulatory molecules on the surface of the T cell subset. Also, the disclosure encompasses a method where the costimulatory molecule(s) present on the surface of the T cell subset are examined prior to contacting the aAPCs with the cell. Thus, the present disclosure provides a novel assay for determining the growth requirements for various T cell subsets.

[0739] In another aspect, the disclosure features a method of treating a subject in need of an altered immune response, the method comprising contacting T cells of the subject with an APC as described herein, thereby treating the subject in need of an altered immune response. In some embodiments, the contacting is in vitro or in vivo. In some embodiments, the contacting is in vitro. In some embodiments, the contacting is in vivo.

[0740] In another aspect, the disclosure features a method of treating a subject in need of an altered immune response, the method comprising a) determining an HLA status of the subject, b) selecting an artificial antigen presenting cell (aAPC) that is immunologically compatible with the subject, wherein the aAPC is an engineered erythroid cell expressing a first exogenous antigenic polypeptide, and c) administering the aAPC to the subject, thereby treating the subject in need of the altered immune response.

[0741] In another aspect, the disclosure features a method of treating a subject in need of an altered immune response, the method comprising a) determining an expression profile of an antigen in the subject, b) selecting an artificial antigen presenting cell (aAPC), wherein the aAPC is an engineered erythroid cell expressing a first exogenous antigenic polypeptide, and c) administering the aAPC to the subject, thereby treating the subject in need of the altered immune response.

[0742] The immune response induced in the subject by administering the aAPCs of the present disclosure may include cellular immune responses mediated by CD8⁺ T cells, capable of killing tumor and infected cells, and CD4⁺ T cell responses. Humoral immune responses, mediated primarily by B cells that produce antibodies following activation by CD4⁺ T cells, may also be induced. A variety of techniques may be used for analyzing the type of immune responses induced by the compositions of the present disclosure, which are well described in the art; e.g., Coligan et al., Current Protocols in Immunology, John Wiley & Sons Inc., 1994.

[0743] CD8+ cytotoxic T cells respond to antigens in association with MHC I molecules. CD4+ helper T cells respond to antigens in association with MHC II molecules. Activated CD4+ T cells in turn activate new and existing CD8+ T cells (both antigen specific and naïve CD8+ T cells). Accordingly, it is contemplated in some embodiments of the invention that an aAPC that expands and activates antigen specific CD8+ T cells (an aAPC comprising an antigen in association with MHC I) can be administered with an aAPC that activates CD4+ T cells (an aAPC comprising an antigen in association with MHC II), thereby potentiating the immune response. In some embodiments, an aAPC that expands and activates antigen specific CD8+ T cells can be administered with an aAPC that activates CD4+ T cells, thereby synergistically increasing the robustness of the immune response. In some embodiments, an aAPC comprising an antigen in association with MHC I and a costimulatory polypeptide can be administered with an aAPC comprising an antigen in association with MHC II. In other embodiments, an aAPC comprising an antigen in association with MHC I can be administered with an aAPC comprising an antigen in association with MHC II and a costimulatory polypeptide. In some embodiments, an aAPC comprising an antigen in association with MHC I and a costimulatory polypeptide can be administered with an aAPC comprising an antigen in association with MHC II and a costimulatory polypeptide.

[0744] In some embodiments, an aAPC that comprises an exogenous antigen-presenting polypeptide and an exogenous antigenic polypeptide, wherein the exogenous antigen-presenting polypeptide is an MHC class I polypeptide or an MHC class I single chain fusion, together with an aAPC that comprises an exogenous antigen-presenting polypeptide and an exogenous antigenic polypeptide, wherein the exogenous antigen-presenting polypeptide is an MHC class II polypeptide or an MHC class II single chain fusion, is administered to a subject. Administering an antigen in association with MHC I, in combination with an antigen in association with MHC II, provides complementary roles of CD8+ and CD4+ T cells.

[0745] In further aspects the present disclosure also provides methods for expanding a population of T cells by cell surface moiety ligation. In addition, it is an object to provide a method of inducing a population of T cells from a subject to rapidly proliferate exponentially for a long term to sufficient numbers for research purposes, comprising isolating a population of T cells from a subject, activating the population of T cells by contacting the T cells ex vivo with at least one exogenous polypeptide that provides a primary activation signal to the T cells; and stimulating the activated T cells with at least one second exogenous polypeptide that provides a co-stimulatory signal, such that T cells that have received a primary activation signal are stimulated to rapidly proliferate. In particular, it is an object to provide such a method when the subject is human, and wherein the method further comprises using the activated T cells to identify antigens in the subject. Moreover, when the subject is infected with a disease or condition, having at least one antigen related thereto, the provided method further comprises using the activated T cells to identify the at least one antigen. The antigen may comprise, e.g., and without limitation, a tumor antigen, an antigen relating to an autoimmune disorder or condition, or an infectious disease or pathogen. The method further comprises screening the at least one antigen as a target molecule for research purposes, or for developing a vaccine based upon the at least one antigen.

Treatment of Conditions that would Benefit from Modulation of T Cell Response

[0746] Methods of administering engineered erythroid cells comprising (e.g., presenting) exogenous agent (e.g., polypeptides) are described, e.g., in WO2015/073587 and WO2015/153102, each of which is incorporated by reference in its entirety.

[0747] In embodiments, the aAPCs comprising engineered erythroid cells described herein are administered to a subject, e.g., a mammal, e.g., a human. Exemplary mammals that can be treated include without limitation, humans, domestic animals (e.g., dogs, cats and the like), farm animals (e.g., cows, sheep, pigs, horses and the like) and laboratory animals (e.g., monkey, rats, mice, rabbits, guinea pigs and the like). The methods described herein are applicable to both human therapy and veterinary applications. In some embodiments, the erythroid cell is an enucleated cell. In some embodiments, the erythroid cell is a nucleated cell.

[0748] In some embodiments, the erythroid cells are administered to a patient every 1, 2, 3, 4, 5, or 6 months.

[0749] In some embodiments, a dose of erythroid cells comprises about 1×10⁹-2×10⁹, 2×10⁹-5×10⁹, 5×10⁹-1×10¹⁰, 1×10¹⁰-2×10¹⁰, 2×10¹⁰-5×10¹⁰, 5×10¹⁰-1×10¹¹, 1×10¹¹-2×10¹¹, 2×10¹¹-5×10¹¹, 5×10¹¹-1×10¹², 1×10¹²-2×10¹², 2×10¹²-5×10¹², or 5×10¹²-1×10¹³ cells.

[0750] In some embodiments, the erythroid cells are administered to a patient in a dosing regimen (dose and periodicity of administration) sufficient to maintain function of the administered erythroid cells in the bloodstream of the patient over a period of 2 weeks to a year, e.g., one month to one year or longer, e.g., at least 2 weeks, 4 weeks, 6 weeks, 8 weeks, 3 months, 6 months, a year, 2 years.

[0751] In some embodiments, the erythroid cells (e.g. aAPCs as described herein) are administered to a patient in two doses or more (e.g. 2, 3, 4 or more doses). In further embodiments, the erythroid cells (e.g. aAPCs as described herein) are administered to a patient in two doses or more, wherein the second dose is administered at a time after the first dose when T-cell proliferation is determined to be at a peak. In some embodiments, the aAPCs of the disclosure are administered in a first dose, wherein the first dose stimulates T cell proliferation and activation. Following the first dose, the aAPCs of the disclosure are administered in a second dose, when T cells are activated and proliferation is at its peak, to stimulate T cell expansion. Without being bound by theory, administering the aAPCs of the disclosure in two doses or more, increases the capacity of the aAPCs to boost the memory T cell population and thereby provide longer efficacy, e.g., efficacy against a relapse of a tumor or re-challenge with an infectious agent.

[0752] Peak T-cell proliferation can be determined using methods known to the skilled artisan. For example, peak T-cell proliferation can be determined by 3H-thymidine incorporation by proliferating T-cells, or by labelling proliferating T-cells with the fluorescent dye 5,6-carboxyfluorescein diacetate succinimidyl ester (CFSE).

[0753] In some aspects, the present disclosure provides a method of treating a disease or condition described herein, comprising administering to a subject in need thereof a composition described herein, e.g., an aAPC described herein. In some embodiments, the disease or condition is a cancer. In some embodiments, the disease or condition is an autoimmune disease. In some embodiments, the disease or condition is an autoimmune disease associated with or triggered by an infectious agent. In some embodiments, the disease or condition is an infectious disease.

[0754] In some aspects, the disclosure provides a use of an aAPC described herein for treating a disease or condition described herein, e.g., cancer, an autoimmune disease, such as an autoimmune disease triggered by an infectious agent, or an infectious disease. In some aspects, the disclosure provides a use of an aAPC described herein for manufacture of a medicament for treating a disease or condition described herein, e.g., cancer, an autoimmune disease, such as an autoimmune disease triggered by an infectious agent, or an infectious disease.

[0755] In some embodiments, the aAPC comprises a first exogenous polypeptide comprising a first therapeutic (e.g. an anti-cancer therapeutic, an autoimmune therapeutic, an infectious disease therapeutic). In certain preferred embodiments, the first therapeutic is an antigen, e.g., a tumor antigen, an antigen relating to an autoimmune disorder or condition, such as an autoimmune disease triggered by an infectious agent, or to an infectious disease or pathogen. In embodiments, the aAPC further comprises a second exogenous polypeptide wherein the second exogenous polypeptide comprises an antigen-presenting polypeptide, e.g., MHCI or MHCII. In embodiments, the aAPC further comprises a third exogenous polypeptide, wherein the third exogenous polypeptide comprises at least one costimulatory polypeptide, coinhibitory polypeptide, or Treg expansion polypeptide as disclosed herein.

[0756] In some embodiments, the aAPC comprises a first exogenous polypeptide comprising a first therapeutic (e.g. an anti-cancer therapeutic, an autoimmune therapeutic, an infectious disease therapeutic) and a second exogenous polypeptide, comprising a second therapeutic (e.g. an anti-cancer therapeutic, an autoimmune therapeutic, an infectious disease therapeutic). In certain preferred embodiments, therapeutic is an antigenic polypeptide, e.g., a tumor antigen, an antigen relating to an autoimmune disorder or condition, such as an autoimmune disease triggered by an infectious agent, or to an infectious disease or pathogen. In embodiments, the aAPC further comprises a third exogenous polypeptide wherein the third exogenous polypeptide comprises an antigen-presenting polypeptide, e.g., MHCI or MHCII. In embodiments, the aAPC further comprises a fourth exogenous polypeptide, wherein the fourth exogenous polypeptide comprises at least one costimulatory polypeptide, coinhibitory polypeptide, or Treg expansion polypeptide as disclosed herein.

[0757] In some embodiments, the aAPC comprises a first exogenous polypeptide comprising a first therapeutic (e.g. an anti-cancer therapeutic, an autoimmune therapeutic, an infectious disease therapeutic), a second exogenous polypeptide, comprising a second therapeutic (e.g. an anti-cancer therapeutic, an autoimmune therapeutic, an infectious disease therapeutic), and a third exogenous polypeptide, comprising a third therapeutic (e.g. an anti-cancer therapeutic, an autoimmune therapeutic, an infectious disease therapeutic). In certain preferred embodiments, therapeutic is an antigenic polypeptide, e.g., a tumor antigen, an antigen relating to an autoimmune disorder or condition, or to an infectious disease or pathogen. In embodiments, the aAPC further comprises a fourth exogenous polypeptide wherein the fourth exogenous polypeptide comprises an antigen-presenting polypeptide, e.g., MHCI or MHCII. In embodiments, the aAPC further comprises a fifth exogenous polypeptide, wherein the third exogenous polypeptide comprises at least one costimulatory polypeptide, coinhibitory polypeptide, or Treg expansion polypeptide as disclosed herein.

[0758] In embodiments, any two or more of the first, second and third therapeutic can recognize, bind and/or act on the same target, for example a cell surface receptor and/or an endogenous human protein. Alternatively, the first, second and third therapeutic can act on different targets.

[0759] The first, second or third targets may be members of the same biological pathway, wherein optionally the targets are cell surface receptors, endogenous human proteins. As used herein, the term “pathway” or “biological pathway” refers to a plurality of biological molecules, e.g., polypeptides, that act together in a sequential manner. Examples of pathways include signal transduction cascades and complement cascades. In some embodiments, a pathway begins with detection of an extracellular signal and ends with a change in transcription of a target gene. In some embodiments, a pathway begins with detection of a cytoplasmic signal and ends with a change in transcription of a target gene. A pathway can be linear or branched. If branched, it can have a plurality of inputs (converging), or a plurality of outputs (diverging).

[0760] The first, second or third targets may be on the same cell types or on different cell types. In some embodiments, the first exogenous polypeptide binds a first cell, e.g., a first cell type, and the second exogenous polypeptide binds a second cell, e.g., a second cell type. In some embodiments, the first and second cell types are the same. In some embodiments, the first and second cell types are different. In some embodiments, the first exogenous polypeptide localizes the engineered erythroid cell to a desired site, e.g., a human cell, and the second exogenous polypeptide has a therapeutic activity, e.g., antigen presenting activity.

[0761] In certain embodiments, therapeutic is a suitable exogenous antigen that is chosen to interact with a specific target. Suitable targets include entities that are associated with a specific disease, disorder, or condition (e.g. cancer, autoimmune disease, infectious disease). However, targets may also be chosen independent of a specific disease, disorder, or condition.

[0762] In some embodiments, the effect of the first and second, or first and second and third exogenous polypeptide is synergistic. The term “synergistic” or “synergy” means a more than additive effect of a combination of two or more agents (e.g., polypeptides that are part of an engineered erythroid cell) compared to their individual effects. In certain embodiments, synergistic activity is a more-than-additive effect of an engineered erythroid cell comprising a first polypeptide and a second polypeptide, compared to the effect of an engineered erythroid cell comprising the first polypeptide and an engineered erythroid cell comprising the second polypeptide. In some embodiments, synergistic activity is present when a first agent produces a detectable level of an output X, a second agent produces a detectable level of the output X, and the first and second agents together produce a more-than-additive level of the output X.

[0763] Cancer

[0764] In certain embodiments, the present disclosure provides an aAPC comprising an erythroid cell (e.g. an enucleated erythroid cell) or an enucleated cell, comprising one or more exogenous polypeptides, wherein one of the one or more exogenous polypeptides comprises a therapeutic for the treatment of cancer (an anti-cancer therapeutic). In some embodiments, the aAPC comprises a first exogenous polypeptide comprising a first anti-cancer therapeutic and a second exogenous polypeptide, comprising a second anti-cancer therapeutic. In some embodiments, the aAPC comprises a first exogenous polypeptide comprising a first anti-cancer therapeutic, a second exogenous polypeptide, comprising a second anti-cancer therapeutic, and a third exogenous polypeptide, comprising a third anti-cancer therapeutic. Any two or more of the first, second and third anti-cancer therapeutic can act on the same target, for example a cell surface receptor and/or an endogenous human protein. Alternatively, the first, second and third anti-cancer therapeutic can act on different targets. Any two or more of the first, second and third targets may be members of the same biological pathway, wherein optionally the targets are cell surface receptors, endogenous human proteins. The first, second or third targets may be on different cell types. In some embodiments, the first exogenous polypeptide localizes the engineered erythroid cell to a desired site, e.g., a human cell, and the second exogenous polypeptide has a therapeutic activity, e.g., antigen presenting activity.

[0765] In certain preferred embodiments, the first therapeutic is an antigen, e.g., a tumor antigen. In certain embodiments, the first therapeutic and second therapeutic is an antigen, e.g., a tumor antigen. In certain embodiments, the first, second and third therapeutic is an antigen, e.g., a tumor antigen.

[0766] In embodiments, the aAPC further comprises an additional exogenous polypeptide wherein the additional exogenous polypeptide comprises an antigen-presenting polypeptide, e.g., an MHC molecule (e.g. MHCI or MHCII). In embodiments, the aAPC further comprises an additional exogenous polypeptide, wherein the additional exogenous polypeptide comprises at least one costimulatory polypeptide. In some embodiments, the aAPC further comprises an additional exogenous polypeptide comprising an antigen-presenting polypeptide and an additional exogenous polypeptide comprising at least one costimulatory polypeptide.

[0767] In some embodiments, the aAPC comprises a first exogenous polypeptide comprising an antigen-presenting polypeptide, e.g., an MHC molecule (e.g. MHCI or MHCII), and the second exogenous polypeptide comprises an antigen (e.g., tumor associated antigen).

[0768] It is contemplated in some embodiments of the invention that an aAPC that expands and activates antigen specific CD8+ T cells in the tumor (an aAPC comprising an antigen in association with MHC I) can be administered with an aAPC that activates CD4+ T cells (an aAPC comprising an antigen in association with MHC II), which activates both antigen-specific and naïve CD8+ T-cells in the tumor and lymph nodes, thereby potentiating a robust anti-tumor response. In some embodiments, an aAPC that expands and activates antigen specific CD8+ T cells in the tumor can be administered with an aAPC that activates CD4+ T cells, which activates both antigen-specific and naïve CD8+ T-cells in the tumor and lymph nodes, thereby synergistically increasing the robustness of the immune response.

[0769] In some embodiments, an aAPC that comprises a first exogenous antigen-presenting polypeptide and a second exogenous polypeptide comprising an antigen (e.g. a first tumor associated antigen), wherein the exogenous antigen-presenting polypeptide is an MHC class I polypeptide or an MHC class I single chain fusion is administered to a subject together with an aAPC that comprises a first exogenous antigen-presenting polypeptide and a second exogenous polypeptide comprising an antigen (e.g. a second tumor associated antigen), wherein the exogenous antigen-presenting polypeptide is an MHC class II polypeptide or an MHC class II single chain fusion, is administered to a subject. In some embodiments, an aAPC comprising an antigen in association with MHC I and a costimulatory polypeptide can be administered with an aAPC comprising an antigen in association with MHC II. In other embodiments, an aAPC comprising an antigen in association with MHC I can be administered with an aAPC comprising an antigen in association with MHC II and a costimulatory polypeptide. In some embodiments, an aAPC comprising an antigen in association with MHC I and a costimulatory polypeptide can be administered with an aAPC comprising an antigen in association with MHC II and a costimulatory polypeptide.

[0770] Without being bound by theory, it is thought that MHC I and MHC II tumor antigen presentation, combined with potent co-stimulation, has the potential to generate sustained tumor-specific killing.

[0771] It is encompassed by the present invention that the antigen may be any tumor antigen, or antigenic-portion thereof, known in the art, including, without limitation, any one or more of the antigens, or antigenic-portions thereof, presented in Table 1. It will be recognized by the skilled artisan that an aAPC comprising an antigen presented in Table 1 can be used to treat a cancer, for example, the specific cancer corresponding to the particular antigen or antigenic peptide as presented in Table 1.

[0772] Accordingly, in some aspects, the disclosure provides a method of treating a subject having cancer, comprising administering to the subject an effective number of the aAPCs described herein to the subject, thereby treating the cancer.

[0773] In another aspect, the present disclosure provides a method of treating a subject having cancer, comprising administering to the subject an effective number of aAPCs comprising an erythroid cell (e.g. an enucleated erythroid cell), comprising one or more exogenous polypeptides, wherein one of the one or more exogenous polypeptides comprises a tumor associated antigen, thereby treating the cancer. Any combination of particular cancer, as the cancer to be treated in the method, and tumor associated antigen, as antigen to be present on the aAPC, as presented together in Table 1, is contemplated by the present invention.

[0774] In another aspect, the present disclosure provides a method of treating a subject having cancer, comprising administering to the subject an effective number of aAPCs comprising an erythroid cell (e.g. an enucleated erythroid cell), comprising one or more exogenous polypeptides, wherein one of the one or more exogenous polypeptides comprises a MAGE-A antigen, thereby treating the cancer. In some embodiments, the erythroid cell is an enucleated cell. In some embodiments, the erythroid cell is a nucleated cell. In some embodiments, the present disclosure provides a method of treating a subject having cancer, comprising administering to the subject an effective number of aAPCs comprising an erythroid cell (e.g. an enucleated erythroid cell), comprising one or more exogenous polypeptides, wherein one of the one or more exogenous polypeptides comprises a MAGE-A1 antigen, thereby treating the cancer. In some embodiments, the MAGE-A1 antigen is a MAGE-A1 antigen presented in Table 1. In some embodiments, the present disclosure provides a method of treating a subject having cancer, comprising administering to the subject an effective number of aAPCs comprising an erythroid cell (e.g. an enucleated erythroid cell), comprising one or more exogenous polypeptides, wherein one of the one or more exogenous polypeptides comprises a MAGE-A2 antigen, thereby treating the cancer. In some embodiments, the MAGE-A2 antigen is a MAGE-A2 antigen presented in Table 1. In some embodiments, the present disclosure provides a method of treating a subject having cancer, comprising administering to the subject an effective number of aAPCs comprising an erythroid cell (e.g. an enucleated erythroid cell), comprising one or more exogenous polypeptides, wherein one of the one or more exogenous polypeptides comprises a MAGE-A3 antigen, thereby treating the cancer. In some embodiments, the MAGE-A3 antigen is a MAGE-A3 antigen presented in Table 1. In some embodiments, the present disclosure provides a method of treating a subject having cancer, comprising administering to the subject an effective number of aAPCs comprising an erythroid cell (e.g. an enucleated erythroid cell), comprising one or more exogenous polypeptides, wherein one of the one or more exogenous polypeptides comprises a MAGE-A4 antigen, thereby treating the cancer. In some embodiments, the MAGE-A4 antigen is a MAGE-A4 antigen presented in Table 1. In some embodiments, the present disclosure provides a method of treating a subject having cancer, comprising administering to the subject an effective number of aAPCs comprising an erythroid cell (e.g. an enucleated erythroid cell), comprising one or more exogenous polypeptides, wherein one of the one or more exogenous polypeptides comprises a MAGE-A5 antigen, thereby treating the cancer. In some embodiments, the MAGE-A5 antigen is a MAGE-A5 antigen presented in Table 1. In some embodiments, the present disclosure provides a method of treating a subject having cancer, comprising administering to the subject an effective number of aAPCs comprising an erythroid cell (e.g. an enucleated erythroid cell), comprising one or more exogenous polypeptides, wherein one of the one or more exogenous polypeptides comprises a MAGE-A6 antigen, thereby treating the cancer. In some embodiments, the MAGE-A6 antigen is a MAGE-A6 antigen presented in Table 1. In some embodiments, the present disclosure provides a method of treating a subject having cancer, comprising administering to the subject an effective number of aAPCs comprising an erythroid cell (e.g. an enucleated erythroid cell), comprising one or more exogenous polypeptides, wherein one of the one or more exogenous polypeptides comprises a MAGE-A7 antigen, thereby treating the cancer. In some embodiments, the MAGE-A7 antigen is a MAGE-A7 antigen presented in Table 1. In some embodiments, the present disclosure provides a method of treating a subject having cancer, comprising administering to the subject an effective number of aAPCs comprising an erythroid cell (e.g. an enucleated erythroid cell), comprising one or more exogenous polypeptides, wherein one of the one or more exogenous polypeptides comprises a MAGE-A8 antigen, thereby treating the cancer. In some embodiments, the MAGE-A8 antigen is a MAGE-A8 antigen presented in Table 1. In some embodiments, the present disclosure provides a method of treating a subject having cancer, comprising administering to the subject an effective number of aAPCs comprising an erythroid cell (e.g. an enucleated erythroid cell), comprising one or more exogenous polypeptides, wherein one of the one or more exogenous polypeptides comprises a MAGE-A9 antigen, thereby treating the cancer. In some embodiments, the MAGE-A9 antigen is a MAGE-A9 antigen presented in Table 1. In some embodiments, the present disclosure provides a method of treating a subject having cancer, comprising administering to the subject an effective number of aAPCs comprising an erythroid cell (e.g. an enucleated erythroid cell), comprising one or more exogenous polypeptides, wherein one of the one or more exogenous polypeptides comprises a MAGE-A10 antigen, thereby treating the cancer. In some embodiments, the MAGE-A10 antigen is a MAGE-A10 antigen presented in Table 1. In some embodiments, the present disclosure provides a method of treating a subject having cancer, comprising administering to the subject an effective number of aAPCs comprising an erythroid cell (e.g. an enucleated erythroid cell), comprising one or more exogenous polypeptides, wherein one of the one or more exogenous polypeptides comprises a MAGE-A11 antigen, thereby treating the cancer. In some embodiments, the MAGE-A11 antigen is a MAGE-A11 antigen presented in Table 1. In some embodiments, the present disclosure provides a method of treating a subject having cancer, comprising administering to the subject an effective number of aAPCs comprising an erythroid cell (e.g. an enucleated erythroid cell), comprising one or more exogenous polypeptides, wherein one of the one or more exogenous polypeptides comprises a MAGE-A12 antigen, thereby treating the cancer. In some embodiments, the MAGE-A12 antigen is a MAGE-A1 antigen presented in Table 1. In some embodiments, the MAGE-A2 antigen is a MAGE-A12 antigen presented in Table 1.

[0775] In some embodiments, the cancer is acute myelogenous leukemia (AML). In some embodiments, the cancer is melanoma. In some embodiments, the cancer is a solid tumor.

[0776] In another aspect, the present disclosure provides a method of treating a subject having cancer, comprising administering to the subject an effective number of aAPCs comprising an erythroid cell (e.g. an enucleated erythroid cell), comprising one or more exogenous antigenic polypeptides, wherein one of the one or more exogenous antigenic polypeptides comprises an immunogenic peptide of MAGE-A antigen. In some embodiments, the present disclosure provides a method of treating a subject having cancer, comprising administering to the subject an effective number of aAPCs comprising an erythroid cell (e.g. an enucleated erythroid cell), comprising one or more exogenous antigenic polypeptides, wherein one of the one or more exogenous antigenic polypeptides comprises an epitope common to several tumor antigens of the MAGE-A family. In some embodiments, the exogenous antigenic polypeptide is p248v9, an immunogenic peptide presented by HLA-A*0201 and capable of inducing cytotoxic T lymphocytes which recognize all the MAGE-A antigens. In some embodiments, the exogenous antigenic polypeptide is the immunogenic peptide p248g9 (YLEYRQVPG (SEQ ID NO: 156)). In some embodiments, the exogenous antigenic polypeptide is the immunogenic peptide p248d9 (YLEYRQVPD (SEQ ID NO: 125)).

[0777] In some embodiments, the cancer is acute myelogenous leukemia (AML). In some embodiments, the cancer is melanoma. In some embodiments, the cancer is a solid tumor.

[0778] In another aspect, the present disclosure provides a method of treating a subject having cancer, comprising administering to the subject an effective number of aAPCs comprising an erythroid cell (e.g. an enucleated erythroid cell), comprising one or more exogenous polypeptides, wherein one of the one or more exogenous antigenic polypeptides comprises a neutrophil granule protease antigen, thereby treating the cancer. In some embodiments, the present disclosure provides a method of treating a subject having cancer, comprising administering to the subject an effective number of aAPCs comprising an erythroid cell (e.g. an enucleated erythroid cell), comprising one or more exogenous antigenic polypeptides, wherein one of the one or more exogenous antigenic polypeptides comprises a neutrophil elastase antigen, thereby treating the cancer. In some embodiments, the present disclosure provides a method of treating a subject having cancer, comprising administering to the subject an effective number of aAPCs comprising an erythroid cell (e.g. an enucleated erythroid cell), comprising one or more exogenous antigenic polypeptides, wherein one of the one or more exogenous antigenic polypeptides comprises a proteinase 3 antigen, thereby treating the cancer. In some embodiments, the present disclosure provides a method of treating a subject having cancer, comprising administering to the subject an effective number of aAPCs comprising an erythroid cell (e.g. an enucleated erythroid cell), comprising one or more exogenous antigenic polypeptides, wherein one of the one or more exogenous antigenic polypeptides comprises a cathepsin G antigen, thereby treating the cancer.

[0779] In some embodiments, the cancer is acute myelogenous leukemia (AML). In some embodiments, the cancer is chronic myelogenous leukemia (CML). In some embodiments, the cancer is breast cancer. In some embodiments, the cancer is lung cancer. In some embodiments, the cancer is melanoma. In some embodiments, the cancer is a solid tumor.

[0780] In another aspect, the present disclosure provides a method of treating a subject having cancer, comprising administering to the subject an effective number of aAPCs comprising an erythroid cell (e.g. an enucleated erythroid cell), comprising one or more exogenous polypeptides, wherein one of the one or more exogenous polypeptides comprises PR1 (VLQELNVTV (SEQ ID NO: 225)).

[0781] In some embodiments, the cancer is acute myelogenous leukemia (AML). In some embodiments, the cancer is chronic myelogenous leukemia (CML). In some embodiments, the cancer is breast cancer. In some embodiments, the cancer is lung cancer. In some embodiments, the cancer is melanoma. In some embodiments, the cancer is a solid tumor.

[0782] In another aspect, the present disclosure provides a method of treating a subject having cancer, comprising administering to the subject an effective number of aAPCs comprising an erythroid cell (e.g. an enucleated erythroid cell), comprising one or more exogenous antigenic polypeptides, wherein one of the one or more exogenous antigenic polypeptides comprises a NY-ESO-1/LAGE-2 antigen, thereby treating the cancer.

[0783] In some embodiments, the cancer is multiple myeloma. In some embodiments, the cancer is non-small cell lung cancer. In some embodiments, the cancer is ovarian cancer. In some embodiments, the cancer is melanoma. In some embodiments, the cancer is a solid tumor.

[0784] In another aspect, the present disclosure provides a method of treating a subject having cancer, comprising administering to the subject an effective number of aAPCs comprising an erythroid cell (e.g. an enucleated erythroid cell), comprising one or more exogenous antigenic polypeptides, wherein one of the one or more exogenous antigenic polypeptides comprises at least one NY-ESO-1/LAGE-2 derived peptide. In some embodiments, the present disclosure provides a method of treating a subject having cancer, comprising administering to the subject an effective number of aAPCs comprising an erythroid cell (e.g. an enucleated erythroid cell), comprising one or more exogenous antigenic polypeptides, wherein one of the one or more exogenous antigenic polypeptides comprise at least one exogenous HLA class I-binding polypeptide derived from NY-ESO-1/LAGE-2. In some embodiments, the polypeptide is SLLMWITQC (SEQ ID NO: 110). In some embodiments, the present disclosure provides a method of treating a subject having cancer, comprising administering to the subject an effective number of aAPCs comprising an erythroid cell (e.g. an enucleated erythroid cell), comprising one or more exogenous antigenic polypeptides, wherein one of the one or more exogenous antigenic polypeptides comprise at least one exogenous HLA class II-binding polypeptide derived from NY-ESO-1/LAGE-2. In some embodiments, the polypeptide is SLLMWITQCFLPVF (SEQ ID NO: 114).

[0785] In some embodiments, the exogenous antigenic polypeptide comprises a NY-ESO-1/LAGE-2 antigen selected from SLLMWITQC (SEQ ID NO: 110), MLMAQEALAFL (SEQ ID NO: 109), YLAMPFATPME (SEQ ID NO: 204), ASGPGGGAPR (SEQ ID NO: 205), LAAQERRVPR (SEQ ID NO: 111), TVSGNILTIR (SEQ ID NO: 206), APRGPHGGAASGL (SEQ ID NO: 207), MPFATPMEAEL (SEQ ID NO: 208), KEFTVSGNILTI (SEQ ID NO: 209), MPFATPMEA (SEQ ID NO: 210), FATPMEAEL (SEQ ID NO: 211), FATPMEAELAR (SEQ ID NO: 212), LAMPFATPM (SEQ ID NO: 213), ARGPESRLL (SEQ ID NO: 214), SLLMWITQCFLPVF (SEQ ID NO: 114), LLEFYLAMPFATPMEAELARRSLAQ (SEQ ID NO: 215), LLEFYLAMPFATPMEAELARRSLAQ (SEQ ID NO: 215), EFYLAMPFATPM (SEQ ID NO: 216), PGVLLKEFTVSGNILTIRLTAADHR (SEQ ID NO: 217), RLLEFYLAMPFA (SEQ ID NO: 218), QGAMLAAQERRVPRAAEVPR (SEQ ID NO: 115), PFATPMEAELARR (SEQ ID NO: 219), PGVLLKEFTVSGNILTIRLT (SEQ ID NO: 220), VLLKEFTVSG (SEQ ID NO: 221), AADHRQLQLSISSCLQQL (SEQ ID NO: 116), LLEFYLAMPFATPMEAELARRSLAQ (SEQ ID NO: 215), LKEFTVSGNILTIRL (SEQ ID NO: 222), PGVLLKEFTVSGNILTIRLTAADHR (SEQ ID NO: 217), LLEFYLAMPFATPMEAELARRSLAQ (SEQ ID NO: 215), KEFTVSGNILT (SEQ ID NO: 223), LLEFYLAMPFATPM (SEQ ID NO: 224), and AGATGGRGPRGAGA (SEQ ID NO: 119). In some embodiments, the NY-ESO-1/LAGE-2 antigen is one or more NY-ESO-1/LAGE-2 antigens presented in Table 1.

[0786] In some embodiments, the cancer is multiple myeloma. In some embodiments, the cancer is non-small cell lung cancer. In some embodiments, the cancer is ovarian cancer. In some embodiments, the cancer is melanoma. In some embodiments, the cancer is a solid tumor.

[0787] In another aspect, the present disclosure provides a method of treating a subject having cancer, comprising administering to the subject an effective number of aAPCs comprising an erythroid cell (e.g. an enucleated erythroid cell), comprising one or more exogenous antigenic polypeptides, wherein one of the one or more exogenous antigenic polypeptides is a gp100 polypeptide. In some embodiments, the present disclosure provides a method of treating a subject having cancer, comprising administering to the subject an effective number of aAPCs comprising an erythroid cell (e.g. an enucleated erythroid cell), comprising one or more exogenous antigenic polypeptides, wherein one of the one or more exogenous antigenic polypeptides is a gp100 polypeptide, and wherein the erythroid cell further presents, e.g. comprises on the cell surface, an exogenous polypeptide comprising a costimulatory polypeptide. In some embodiments, the costimulatory polypeptide is 4-1BBL. In some embodiments, the present disclosure provides a method of treating a subject having cancer, comprising administering to the subject an effective number of aAPCs comprising an erythroid cell (e.g. an enucleated erythroid cell), comprising an exogenous antigen-presenting polypeptide and an exogenous antigenic polypeptide, wherein the exogenous antigenic polypeptide is specifically bound to the exogenous antigen-presenting polypeptide (e.g. an MHC class I or class II molecule), wherein the exogenous antigen-presenting polypeptide is an MHC class I polypeptide or single chain fusion or an MHC class II polypeptide or single chain fusion, wherein the exogenous antigenic polypeptide is a gp100 antigen. In some embodiments, the present disclosure provides a method of treating a subject having cancer, comprising administering to the subject an effective number of aAPCs comprising an erythroid cell (e.g. an enucleated erythroid cell), comprising an exogenous antigen-presenting polypeptide and an exogenous antigenic polypeptide, wherein the exogenous antigenic polypeptide is specifically bound to the exogenous antigen-presenting polypeptide (e.g. an MHC class I or class II molecule), wherein the exogenous antigen-presenting polypeptide is an MHC class I polypeptide or single chain fusion or an MHC class II polypeptide or single chain fusion, wherein the exogenous antigenic polypeptide is a gp100 antigen, and wherein the erythroid cell further presents, e.g. comprises on the cell surface, an exogenous polypeptide comprising a costimulatory polypeptide. In some embodiments, the costimulatory polypeptide is 4-1BBL. In some embodiments, the present disclosure provides a method of treating a subject having cancer, comprising administering to the subject an effective number of aAPCs comprising an erythroid cell (e.g. an enucleated erythroid cell), comprising an exogenous antigen-presenting polypeptide and an exogenous antigenic polypeptide, wherein the exogenous antigenic polypeptide is specifically bound to the exogenous antigen-presenting polypeptide (e.g. an MHC class I or class II molecule), wherein the exogenous antigen-presenting polypeptide is an MHC class I polypeptide or single chain fusion, wherein the exogenous antigenic polypeptide is a gp100 antigen. In some embodiments, the exogenous antigen-presenting polypeptide is MHCI-2Db. In some embodiments, the present disclosure provides a method of treating a subject having cancer, comprising administering to the subject an effective number of aAPCs comprising an erythroid cell (e.g. an enucleated erythroid cell), comprising an exogenous antigen-presenting polypeptide and an exogenous antigenic polypeptide, wherein the exogenous antigen-presenting polypeptide is an MHC class I polypeptide or single chain fusion, wherein the exogenous antigenic polypeptide is a gp100 antigen, and wherein the erythroid cell further presents, e.g. comprises on the cell surface, an exogenous polypeptide comprising a costimulatory polypeptide. In some embodiments, the costimulatory polypeptide is 4-1BBL. In some embodiments, the exogenous antigen-presenting polypeptide is MHCI-2Db.

[0788] In some embodiments, the exogenous antigenic polypeptide comprises a gp100 antigen selected from KTWGQYWQV (SEQ ID NO: 306), (A)MLGTHTMEV (SEQ ID NO: 307), IMDQVPFSV (SEQ ID NO: 308), ITDQVPFSV (SEQ ID NO: 309), YLEPGPVTA (SEQ ID NO: 310), LLDGTATLRL (SEQ ID NO: 311), VLYRYGSFSV (SEQ ID NO: 312), SLADTNSLAV (SEQ ID NO: 313), RLMKQDFSV (SEQ ID NO: 314), RLPRIFCSC (SEQ ID NO: 315), LIYRRRLMK (SEQ ID NO: 316), ALLAVGATK (SEQ ID NO: 317), IALNFPGSQK (SEQ ID NO: 318), RSYVPLAHR (SEQ ID NO: 319), ALNFPGSQK (SEQ ID NO: 320), ALNFPGSQK (SEQ ID NO: 320), VYFFLPDHL (SEQ ID NO: 321), RTKQLYPEW (SEQ ID NO: 322), HTMEVTVYHR (SEQ ID NO: 323), SSPGCQPPA (SEQ ID NO: 324), VPLDCVLYRY (SEQ ID NO: 325), LPHSSSHWL (SEQ ID NO: 326), SNDGPTLI (SEQ ID NO: 327), GRAMLGTHTMEVTVY (SEQ ID NO: 328), WNRQLYPEWTEAQRLD (SEQ ID NO: 329), TTEWVETTARELPIPEPE (SEQ ID NO: 330), TGRAMLGTHTMEVTVYH (SEQ ID NO: 331), GRAMLGTHTMEVTVY (SEQ ID NO: 328). In some embodiments, the gp100 antigen is one or more gp100 antigens presented in Table 1.

[0789] In some embodiments, the cancer is multiple myeloma. In some embodiments, the cancer is non-small cell lung cancer. In some embodiments, the cancer is ovarian cancer. In some embodiments, the cancer is melanoma. In some embodiments, the cancer is a solid tumor.

[0790] In another aspect, the present disclosure provides a method of treating a subject having cancer, comprising administering to the subject an effective number of aAPCs comprising an erythroid cell (e.g. an enucleated erythroid cell), comprising one or more exogenous antigenic polypeptides, wherein one of the one or more exogenous antigenic polypeptides comprises a telomerase antigen, thereby treating the cancer. In some embodiments, the present disclosure provides a method of treating a subject having cancer, comprising administering to the subject an effective number of aAPCs comprising an erythroid cell (e.g. an enucleated erythroid cell), comprising one or more exogenous antigenic polypeptides, wherein one of the one or more exogenous antigenic polypeptides comprises a human telomerase, thereby treating the cancer. In some embodiments, the cancer is acute myelogenous leukemia (AML).

[0791] In another aspect, the present disclosure provides a method of treating a subject having cancer, comprising administering to the subject an effective number of aAPCs comprising an erythroid cell (e.g. an enucleated erythroid cell), comprising one or more exogenous antigenic polypeptides, wherein one of the one or more exogenous antigenic polypeptides comprises ILAKFLHWL (SEQ ID NO: 658).

[0792] In another aspect, the present disclosure provides a method of treating a subject having cancer, comprising administering to the subject an effective number of aAPCs comprising an erythroid cell (e.g. an enucleated erythroid cell), comprising one or more exogenous antigenic polypeptides, wherein one of the one or more exogenous antigenic polypeptides comprises RLVDDFLLV (SEQ ID NO: 659).

[0793] In another aspect, the present disclosure provides a method of treating a subject having cancer, comprising administering to the subject an effective number of aAPCs comprising an erythroid cell (e.g. an enucleated erythroid cell), comprising one or more exogenous antigenic polypeptides, wherein one of the one or more exogenous antigenic polypeptides comprises RPGLLGASVLGLDDI (SEQ ID NO: 663).

[0794] In another aspect, the present disclosure provides a method of treating a subject having cancer, comprising administering to the subject an effective number of aAPCs comprising an erythroid cell (e.g. an enucleated erythroid cell), comprising one or more exogenous antigenic polypeptides, wherein one of the one or more exogenous antigenic polypeptides comprises LTDLQPYMRQFVAHL (SEQ ID NO: 664).

[0795] In some embodiments, the cancer is acute myelogenous leukemia (AML).

[0796] In another aspect, the present disclosure provides a method of treating a subject having acute myelogenous leukemia (AML), comprising administering to the subject an effective number of aAPCs comprising an erythroid cell (e.g. an enucleated erythroid cell), comprising one or more exogenous antigenic polypeptides, wherein one of the one or more exogenous antigenic polypeptides comprises PR1 (VLQELNVTV (SEQ ID NO: 225)). In another aspect, the present disclosure provides a method of treating a subject having acute myelogenous leukemia (AML), comprising administering to the subject an effective number of aAPCs comprising an erythroid cell (e.g. an enucleated erythroid cell), comprising one or more exogenous antigenic polypeptides, wherein one of the one or more exogenous antigenic polypeptides comprises PR1 (VLQELNVTV (SEQ ID NO: 225)), and wherein the erythroid cell further presents, e.g. comprises on the cell surface, at least one exogenous polypeptide comprising a costimulatory polypeptide. In another aspect, the present disclosure provides a method of treating a subject having acute myelogenous leukemia (AML), comprising administering to the subject an effective number of aAPCs comprising an erythroid cell (e.g. an enucleated erythroid cell), comprising one or more exogenous antigenic polypeptides, wherein one of the one or more exogenous antigenic polypeptides comprises PR1 (VLQELNVTV (SEQ ID NO: 225)), and wherein the erythroid cell further presents, e.g. comprises on the cell surface, at least one exogenous polypeptide comprising 4-1BBL. In another aspect, the present disclosure provides a method of treating a subject having acute myelogenous leukemia (AML), comprising administering to the subject an effective number of aAPCs comprising at least one exogenous antigenic polypeptide, PR1 (VLQELNVTV (SEQ ID NO: 225)), fused to an exogenous antigen presenting polypeptide, MHCI HLA-A2, fused to the GPA transmembrane domain (GPA), and wherein the erythroid cell further presents, e.g. comprises on the cell surface, at least one exogenous polypeptide comprising a costimulatory polypeptide. In another aspect, the present disclosure provides a method of treating a subject having acute myelogenous leukemia (AML), comprising administering to the subject an effective number of aAPCs comprising at least one exogenous antigenic polypeptide, PR1 (VLQELNVTV (SEQ ID NO: 225)), fused to an exogenous antigen presenting polypeptide, MHCI HLA-A2, fused to the GPA transmembrane domain (GPA), and wherein the erythroid cell further presents, e.g. comprises on the cell surface, at least one exogenous polypeptide comprising 4-1BBL.

[0797] The present disclosure is not limited to a certain type of cancer, but rather any cancer is contemplated as being treated by the aAPCs described herein. In certain embodiments, the cancer includes, but is not limited to, a cancer selected from acute lymphoblastic leukemia (ALL), ACUTE myeloid leukemia (AML), anal cancer, bile duct cancer, bladder cancer, bone cancer, bowel cancer, brain tumors, breast cancer, cancer of unknown primary, cancer spread to bone, cancer spread to brain, cancer spread to liver, cancer spread to lung, carcinoid, cervical cancer, choriocarcinoma, chronic lymphocytic leukemia (CLL), chronic myeloid leukemia (CML), colon cancer, colorectal cancer, endometrial cancer, eye cancer, gallbladder cancer, gastric cancer, gestational trophoblastic tumors (GTT), hairy cell leukaemia, head and neck cancer, hodgkin lymphoma, kidney cancer, laryngeal cancer, leukaemia, liver cancer, lung cancer, lymphoma, melanoma skin cancer, mesothelioma, men's cancer, molar pregnancy, mouth and oropharyngeal cancer, myeloma, nasal and sinus cancers, nasopharyngeal cancer, non hodgkin lymphoma (NHL), oesophageal cancer, ovarian cancer, pancreatic cancer, penile cancer, prostate cancer, rare cancers, rectal cancer, salivary gland cancer, secondary cancers, skin cancer (non melanoma), soft tissue sarcoma, stomach cancer, testicular cancer, thyroid cancer, unknown primary cancer, uterine cancer, vaginal cancer, and vulval cancer.

[0798] In certain embodiments, the cancer is a leukemia, e.g. AML or ALL. In other embodiments, the cancer is a hepatic cell carcinoma. In still other embodiments, the cancer is selected from a cervical cancer, head and neck cancer, lymphomas, and kidney clear cell carcinoma.

[0799] A neoantigen is a class of tumor antigens that arises from a tumor-specific mutation(s) which alters the amino acid sequence of genome encoded proteins. A neoantigen can include a polypeptide sequence or a nucleotide sequence. A mutation can include a frameshift or non-frameshift indel (insertion or deletion), missense or nonsense substitution, splice site alteration, genomic rearrangement or gene fusion, or any genomic or expression alteration giving rise to a neoORF. A mutation can also include a splice variant. Post-translational modifications specific to a tumor cell can include aberrant phosphorylation. Post-translational modifications specific to a tumor cell can also include a proteasome-generated spliced antigen. See Liepe et al., A large fraction of HLA class I ligands are proteasome-generated spliced peptides; Science. 2016 Oct. 21; 354 (6310):354-358. A tumor neoantigen is a neoantigen present in a subject's tumor cell or tissue but not in the subject's corresponding normal cell or tissue.

[0800] Recent analyses of The Cancer Genome Atlas (TCGA) datasets have linked the genomic landscape of tumors with tumor immunity, implicating neoantigen load in driving T cell responses (Brown et al., Genome Res. 2014 May; 24(5):743-50, 2014) and identifying somatic mutations associated with immune infiltrates (Rutledge et al., Clin Cancer Res. 2013 Sep. 15; 19(18):4951-60, 2013). Rooney et al. (2015 Jan. 15; 160(1-2):48-61) suggest that neoantigens and viruses are likely to drive cytolytic activity, and reveal known and novel mutations that enable tumors to resist immune attack.

[0801] In some embodiments, the antigen is a neoantigen identified from a cancer cell in a subject. In some embodiments, the neoantigen is a shared neoantigen. Methods of identifying neoantigens are known in the art and described, e.g., in U.S. Pat. No. 10,055,540, incorporated by reference in its entirety herein. Neoantigenic polypeptides and shared neoantigenic polypeptides are described, for example, in PCT/US2016/033452, U.S. Publication No. 20180055922, Schumacher and Hacohen et al. (Curr Opin Immunol. 2016 August; 41:98-103), Gubin, M M et al. (Nature. 2014 Nov. 27; 515(7528):577-81), Schumacher and Schreiber, Science. 2015 Apr. 3; 348(6230):69-74), Ott P A., et al., Nature. 2017 Jul. 13; 547(7662):217-221, all of which are incorporated by reference in their entireties herein.

[0802] Accordingly, in some embodiments, the exogenous antigenic polypeptide is a neoantigen polypeptide. In some embodiments, the exogenous antigenic polypeptide is a neoantigen polypeptide set forth in The Comprehensive Tumor-Specific Neoantigen Database (TSNAdb v1.0); available at biopharm.zju.edu.cn/tsnadb and described in Wu et al., Genomics Proteomics Bioinformatics 16 (2018) 276-282. In some embodiments, the exogenous antigenic polypeptide is a neoantigen polypeptide set forth in U.S. Pat. No. 10,055,540, incorporated by reference in its entirety herein. In some embodiments, the neoantigen polypeptide is selected from a polypeptide listed in Table 14.

TABLE 14
Neoantigen Polypeptides

| HLA class I | |
|---|---|
| allele | Neoantigen Peptide |
| HLA-A*01:01 | YEMFNDKSF (SEQ ID NO: 874) |
| HLA-A*02:01 | HRQEIFSHDFJ (SEQ ID NO: 875) |
| HLA-B*07:01 | FJIEJFOES (SEQ ID NO: 876) |
| HLA-B*08:01 | NEIOREIREI (SEQ ID NO: 877) |
| HLA-C*01:03 | JFKSIFEMMSJDSSU (SEQ ID NO: 878) |
| HLA-C*01:04 | KNFLENFIESOFI (SEQ ID NO: 879) |

[0803] In some embodiments, the neoantigen polypeptide is selected from a polypeptide listed in Table 15.

TABLE 15
Neoantigen Polypeptides

| Gene | HLA class I | |
|---|---|---|
| (Mutation) | allele | Neoantigen Peptide |
| BRAF | HLA-A*03:01 | KIGDFGLATEK (SEQ ID NO: 880) |
| (V600E) | | |
| KRAS (G12D) | HLA-A*02:01 | KLVVVGADGV (SEQ ID NO: 881) |
| KRAS (G12V) | HLA-A*02:01 | KLVVVGAVGV (SEQ ID NO: 882) |
| KRAS (G12V) | HLA-A*02:01 | KLVVVGAV (SEQ ID NO: 883) |
| BRAF | HLA-A*11:01 | KIGDFGLATEK (SEQ ID NO: 884) |
| (V600E) | | |
| PIK3CA | HLA-C*07:01 | ARHGGWTTKM (SEQ ID NO: 885) |
| (H1047R) | | |
| PIK3CA | HLA-C*07:02 | ARHGGWTTKM (SEQ ID NO: 886) |
| (H1047R) | | |
| PIK3CA | HLA-A*03:01 | STRDPLSEITK (SEQ ID NO: 887) |
| (E545K) | | |
| BRAF | HLA-B*57:01 | FGLATEKSRW (SEQ ID NO: 888) |
| (V600E) | | |
| BRAF | HLA-B*57:01 | LATEKSRW (SEQ ID NO: 889) |
| (V600E) | | |
| H3F3A | HLA-A*0201 | RMSAPSTGGV (SEQ ID NO: 890) |
| (K27M) | | |

[0804] For highly aggressive midline gliomas, a recurrent point mutation in the histone-3 gene (H3F3A) causes an amino acid change from lysine to methionine at position 27 (K27M). Ochs et al. (Oncoimmunology. 2017; 6(7):e1328340, incorporated by reference in its entirety herein) have shown that a peptide vaccine against K27M-mutant histone-3 is capable of inducing effective, mutation-specific, cytotoxic T-cell- and T-helper-1-cell-mediated immune responses in a major histocompatibility complex (MHC)-humanized mouse model. Accordingly, in some embodiments, the neoantigen polypeptide is H3F3A (K27M) (SEQ ID NO: 890).

[0805] In some embodiments, the cancer is a cancer associated with an oncogenic virus, for example Epstein Barr virus (EBV), hepatitis B and C (HBV and HCV), human papilloma virus (HPV), Kaposi sarcoma virus (KSV), and polyoma viruses. In other certain embodiments, the cancer is a cancer where retrovirus epitopes are identified. Cancers which are associated with a virus and which may be treated using the methods of the invention include, but are not limited to, cervical cancer, head and neck cancer, lymphomas, and kidney clear cell carcinoma.

[0806] Human leukocyte antigen (HLA) molecules are required for the immune recognition and subsequent killing of neoplastic cells by the immune system, as tumor antigens must be presented in an HLA-restricted manner to be recognized by T-cell receptors. Some tumor cells use aberrant expression of non-classical HLA-I molecules (HLA-E and HLA-G), which function as inhibitor ligands for immune-competent cells, to escape immune recognition and facilitate tumor immune escape (Moreau et al., Cell Mol Life Sci. 2002 September; 59(9):1460-6, incorporated by reference in its entirety herein). HLA class I histocompatibility antigen, alpha chain G (HLA-G) is a non-classical MHC class I molecule comprising a heavy a chain comprising one of more of alpha1, alpha2, and alpha3 domains.

[0807] In some embodiments, an artificial antigen presenting cell comprises on the cell surface an exogenous antigenic polypeptide, wherein the exogenous antigenic polypeptide is an HLA-G-derived polypeptide. In some embodiments, the HLA-G derived polypeptides are selected from the polypeptides shown below:

(SEQ ID NO: 891)
HLA-G146-154-DYLALNEDL
(SEQ ID NO: 892)
HLA-G194-202-RYLENGKEM
(SEQ ID NO: 893)
HLA-G139-148-RYAYDGKDYL
(SEQ ID NO: 894)
HLA-G141-150-AYDGKDYLAL

[0808] In some embodiments, the peptides shown above (SEQ ID NOs 891-894) bind to the a specific HLA-A allele: HLA-A*24:02 (e.g., HLA-A*24:02:01:01). In some embodiments, the peptides shown above (SEQ ID NOs 891-894) bind to other HLA alleles described herein.

[0809] In one particular embodiment, an artificial antigen presenting cell comprises an erythroid cell, wherein the erythroid cell presents, e.g. comprises on the cell surface, at least one exogenous antigenic polypeptide, PR1, a human leukocyte antigen (HLA)-A2 restricted peptide, fused to an exogenous antigen presenting polypeptide, MHCI HLA-A2, fused to the GPA transmembrane domain (GPA) (PR1-HLA-A2-GPA). In some embodiments, the erythroid cell is an enucleated cell. In some embodiments, the erythroid cell is a nucleated cell.

[0810] In certain embodiments, the aAPCs of the disclosure are used to treat highly vascularized tumors. Without being bound by theory, greater vascularization renders the tumors more accessible to the aAPCs comprising enucleated cells (e.g. erythroid cells) of the present disclosure. Tumor vascularity can be measured, for example, by intercapillary distance (thought to reflect tumor oxygenation) and microvessel density (provides a histological assessment of tumor angiogenesis). A highly vascular tumor can be any tumor of vascular origin, for example a hemangioma, a lymphangioma, a hemangioendothelioma, Kaposi sarcoma, an angiosarcoma, a hemangioblastoma.

[0811] In other embodiments, the aAPCs of the disclosure are used to treat tumors with leaky vasculature. There is general agreement that blood vessels in tumors are abnormal. One manifestation of this abnormality is a defective and leaky endothelium. Blood vessel leakiness not only influences the internal environment of tumors and perhaps the rate of angiogenesis, but it also governs access of therapeutics. Without being bound by theory, a more leaky blood vessel would provide more access to the aAPCs comprising enucleated cells (e.g. erythroid cells) of the present disclosure.

[0812] Autoimmune Diseases

[0813] Over the past two decades, considerable progress has been made in the treatment of a range of autoimmune disorders with many patients enjoying an improvement in quality of life as a result. Despite their success, current therapeutic approaches to autoimmune diseases are either generally or specifically immunosuppressive, and expose patients to an increased risk of opportunistic infection and hematological cancers, as is the case with JAK inhibitors, anti-TNF antibodies and anti-CD20 targeted antibodies. In up to one-third of cases, patients with autoimmune disorders fail to respond to treatment, and most responding patients ultimately lose response over time.

[0814] While the triggers of most autoimmune diseases remain unknown, it is generally understood that clinical disease is the result of a loss of tolerance to one's own cells. The accepted model of disease assumes a genetic susceptibility triggered by an environmental event, which leads to a breakdown of T-cell-mediated immune suppression. In principle, restoration of peripheral tolerance should provide patients with a complete or partial cure.

[0815] A range of competitive approaches to peripheral tolerance restoration have been investigated over the years. These include the oral administration and direct injection of a protein or peptide with or without immunosuppression, the creation of peptide bearing nanoparticles and the adoptive transfer of engineered regulatory T cells. Thus far, these approaches have not proven to be successful in late stage clinical trials, but the field continues to progress. Direct administration of peptides and nanoparticles suffer biodistribution, stability, presentation and orientation challenges which limit the effectiveness of cell-to-cell signaling. To date, adoptive transfer approaches are all autologous and are hampered by some of the same handling and scalability issues that limit the application of other cellular therapies.

[0816] Thus, in certain embodiments, the aAPCs of the present disclosure provide a novel and improved method of treating autoimmune diseases. The methods provided for treating autoimmune diseases have numerous advantages, including, for example, effective presentation of antigen on the surface of a cell (erythroid cell) together with an antigen-presenting polypeptide, e.g., MHC I or II and the extremely long half life of aAPCs in the circulation, thus providing extended exposure to the properly presented antigen.

[0817] Accordingly, in certain embodiments, the present disclosure provides an aAPC comprising an erythroid cell (e.g. an enucleated erythroid cell), comprising one or more exogenous polypeptides, wherein one of the one or more exogenous polypeptides comprises an autoimmune disease therapeutic. In some embodiments, the aAPC comprises a first exogenous polypeptide comprising a first autoimmune therapeutic and a second exogenous polypeptide, comprising a second autoimmune therapeutic. In some embodiments, the aAPC comprises a first exogenous polypeptide comprising a first autoimmune therapeutic, a second exogenous polypeptide, comprising a second autoimmune therapeutic, and a third exogenous polypeptide, comprising a third autoimmune therapeutic. In some embodiments, the erythroid cell is an enucleated cell. In some embodiments, the erythroid cell is a nucleated cell.

[0818] The first, second and third autoimmune therapeutic can act on the same target, for example a cell surface receptor and/or an endogenous human protein. Alternatively, the first, second and third anti-cancer therapeutic can act on different targets. The first, second or third targets may be members of the same biological pathway, wherein optionally the targets are cell surface receptors and/or endogenous human proteins. The first, second or third targets may be on different cell types. In embodiments, the first, second and/or third autoimmune therapeutic is a first, second and/or third exogenous polypeptide as described herein. For example, in some embodiments, the first exogenous polypeptide localizes the engineered erythroid cell to a desired site, e.g., a human cell, and the second exogenous polypeptide has a therapeutic activity, e.g., antigen presenting activity.

[0819] In some embodiments, the first exogenous polypeptide comprises an antigen-presenting polypeptide, e.g., an MHC molecule (e.g. MHCI or MHCII), and the second exogenous polypeptide comprises an antigen. In some embodiments, the MHCI is selected from HLA A, HLA B, and HLA C. In some embodiments, the MHCII is selected from HLA-DPα, HLA-DPβ, HLA-DM, HLA DOA, HLA DOB, HLA DQα, HLA DQβ, HLA DRα, and HLA DRβ. It will be recognized by one of skill in the art that, in preferred embodiments, the antigen is associated with or is the cause or trigger of the autoimmune disorder. For example, the antigen may be a self-antigen to which the autoimmune response is directed. In some embodiments, the antigen is selected from the antigens listed in Table 16, or an antigenic-portion thereof. In some embodiments, the antigen is selected from the antigens listed in Table 17, or an antigenic-portion thereof. In some embodiments, the antigen is selected from the antigens listed in Table 18, or an antigenic-portion thereof. In the provided methods for treating an autoimmune disorder, where the aAPC comprises an antigen-presenting polypeptide and an antigen listed in Tables 16, 17 or 18, or antigenic-portion thereof, the aAPC may be administered to a subject to treat the autoimmune disorder corresponding to the antigen as provided in Tables 16, 17 or 18.

[0820] In one aspect, the aAPCs are designed to suppress undesired T cell activity associated with or driving the autoimmune disorder. Thus, in some embodiments, the aAPC further comprises at least one exogenous co-inhibitory polypeptide as described herein. In some embodiments, the exogenous co-inhibitory polypeptide is selected from the co-inhibitory polypeptides listed in Table 7. In some embodiments, the exogenous co-inhibitory polypeptide is selected from IL-35, IL-10, VSIG-3 and a LAG3 agonist. In some embodiments, the co-inhibitory polypeptide suppresses an autoreactive T cell.

[0821] In another aspect, the aAPCs are designed to stimulate T regulatory cells, thereby biasing the immune system back to a more tolerogenic state. Thus, in some embodiments, the aAPC further comprises at least one costimulatory polypeptide as described herein. In this aspect, in preferred embodiments the at least one exogenous costimulatory polypeptide expands regulatory T-cells (Tregs) and is, e.g., an exogenous Treg costimulatory polypeptide as described herein. In some embodiments, the exogenous costimulatory polypeptide is selected from the costimulatory polypeptides listed in Table 10. In some embodiments, the costimulatory polypeptide is selected from the costimulatory polypeptides listed in Table 11.

[0822] In yet another aspect, the aAPCs are designed to expand and stimulate T cells, e.g., cytotoxic CD8+ T cells. In this aspect, the autoimmune disorder is preferably an autoimmune disorder caused or triggered by an infectious agent. In embodiments, the aAPC further comprises at least one exogenous costimulatory polypeptide as described herein. In embodiments, the at least one exogenous costimulatory polypeptide expands cytotoxic CD8+ T cells. In some embodiments, the exogenous costimulatory polypeptide is selected from the costimulatory polypeptides listed in Table 6. In some embodiments, the costimulatory polypeptides is selected from the group consisting of 4-1BBL, LIGHT, anti CD28, CD80, CD86, CD70, OX40L, IL-7, IL-12, GITRL, TIM4, SLAM, CD48, CD58, CD83, CD155, CD112, IL-15Rα fused to IL-15, IL-21, ICAM-1, a ligand for LFA-1, anti CD3, and a combination thereof. This aspect is described in greater detail below.

[0823] In some aspects, the disclosure provides a method of treating a subject having an autoimmune disease, comprising administering to the subject an effective number of the erythroid cells described herein to the subject, thereby treating the autoimmune disease. In various embodiments, the autoimmune disease may be an autoimmune disease provided in Tables 16, 17 or 18. In such methods, the aAPC useful for treating the autoimmune disorder comprises an exogenous antigen-presenting polypeptide and an antigenic polypeptide, wherein the antigenic polypeptide may be an antigen listed in Tables 16, 17 or 18, or antigenic-portion thereof, wherein the aAPC comprising the antigen as provided in Tables 16, 17 or 18 is used to treat the corresponding autoimmune disorder listed in Tables 16, 17 or 18.

[0824] For example, in some embodiments, the disclosure provides a method of treating a subject having the autoimmune disease Multiple Sclerosis (MS). In some embodiments, an artificial antigen presenting cell comprises an erythroid cell, wherein the erythroid cell presents, e.g. comprises on the cell surface, at least one exogenous antigenic polypeptide, wherein the antigenic peptide is MOG. In one particular embodiment, an artificial antigen presenting cell comprises an erythroid cell, wherein the erythroid cell presents, e.g. comprises on the cell surface, at least one exogenous antigenic polypeptide, wherein the antigenic peptide is MOG, and an exogenous antigen-presenting polypeptide, which is a MHCII single chain fusion, wherein the antigen-presenting polypeptide is fused to GPA (MOG-MHCII-GPA). In some embodiments, an artificial antigen presenting cell comprises an erythroid cell, wherein the erythroid cell presents, e.g. comprises on the cell surface, at least one exogenous antigenic polypeptide, wherein the antigenic peptide is MOG, an exogenous antigen-presenting polypeptide, wherein the exogenous antigenic polypeptide is specifically bound to the exogenous antigen-presenting polypeptide, which is a MHCII single chain fusion, and at least one Treg expansion/costimulatory polypeptide. In some embodiments, the Treg expansion/costimulatory peptide is CD25-specific IL-2. In a further embodiment, an artificial antigen presenting cell comprises an erythroid cell, wherein the erythroid cell presents, e.g. comprises on the cell surface, at least one exogenous antigenic polypeptide, wherein the antigenic peptide is MOG, an exogenous antigen-presenting polypeptide, wherein the exogenous antigenic polypeptide is specifically bound to the exogenous antigen-presenting polypeptide, which is a MHCII single chain fusion, and at least one coinhibitory polypeptide. In some embodiments, the coinhibitory polypeptide is PD-L1.

[0825] In some embodiments, the erythroid cell is an enucleated cell. In some embodiments, the erythroid cell is a nucleated cell.

[0826] In some embodiments, the autoimmune disease is a single antigen disease. Examples of single antigen diseases and their related antigens are shown in Table 16, below.

TABLE 16
Autoimmune diseases and associated single antigens

| Disease | Antigen |
|---|---|
| Neuromyelitis Optica (NMO) | Aquaporin 4 (AQP4) |
| Myasthenia Gravis (MG) | Acetylcholine receptor (AchR) |
| Membranous glomerulonephritis | Phospholipase A2 receptor (PLA2R) |
| Pemphigus Vulgaris (PV) | desmoglein 3 (DSG3) |
| Pemphigus Foliaceus (PF) | desmoglein 1 (DSG1) |

[0827] In another embodiments, the autoimmune disease is a multi-antigen disease. In embodiments wherein the autoimmune disease is a multi-antigen disease, the subject may be treated with aAPCs targeting more than one, e.g., two, three, four or more, of the antigens. It will be recognized by the skilled artisan that the multiple antigens may be present on the same aAPC, or they may be present on distinct aAPCs wherein a combination of the two, three, four or more distinct aAPCs comprising a single antigen are administered to the subject to treat the disorder. Examples of multi-antigen diseases and their related antigens are shown in Table 17, below.

TABLE 17
Autoimmune diseases and associated multi-antigens

| Disease | Antigen |
|---|---|
| Type I diabetes mellitus (T1DM) | Insulin/proinsulin/preproinsulin |
| Type I diabetes mellitus (T1DM) | glutamate decarboxylase (GAD65) |
| Type I diabetes mellitus (T1DM) | insulinoma antigen-2 (IA-2) |
| Multiple Sclerosis (MS) | myelin oligodendrocyte glycoprotein |
| | (MOG) |
| Multiple Sclerosis (MS) | myelin basic protein (MBP) |
| Multiple Sclerosis (MS) | proteolipid protein (PLP) |
| anti-phospholipid syndrome | beta-2 glycoprotein 1 (b2GP1) |
| (APS)/CAPS | |
| celiac disease | A-gliadin |

[0828] In certain embodiments, the autoimmune disease is selected from the group consisting of pemphigus vulgaris, myasthenia gravis, neuromyelitis optica, bullous pemphigoid, celiac disease multiple sclerosis, type 1 diabetes, rheumatoid arthritis, and membranous glomerulonephritis. In some embodiments, the autoimmune disease is selected from those listed in Table 18, below.

TABLE 18
Antigens for MS, Type 1 Diabetes, RA, and Membranous Nephritis

| Disease | Known antigen |
|---|---|
| Acute rheumatic fever | cross reactive antibodies to cardiac muscle |
| alopecia areata | Trychohyalin, keratin 16 |
| ANCA-associated vasculitis | Neutrophil cytoplasmic antigen, proteinase 3, |
| | myeloperodixase, bacterial permiability increasing factor |
| autoimmune gastritis | H,K adenosine triphosphatase |
| Autoimmune hemolytic | Rh blood group antigens, 1 antigen |
| anemia | |
| autoimmune hepatitis | nuclear protein, liver-kidney microsome type 1, liver cytosol |
| | type 1 |
| autoimmune myocarditis | cardiac myosin |
| Autoimmune thyroiditis | Thyroid peroxidase, thyroglobulin, thyroid-stimulating |
| | hormone receptor |
| Autoimmune uveitis | Retinal arrestin (S-antigen) |
| dermatomyositis | Mi2 ATPase |
| diabetes (type 1) | Pancreatic beta cell antigen |
| good pasture's syndrome | Noncollagenous domain of basement membrane collagen |
| | type IV |
| Graves' disease | Thyroid stimulating hormone receptor |
| Guillain-Barré syndrome | Neurofascin-18G, gliomedin, nodal adhesion molecueles |
| Hypoglycemia | Insulin receptor |
| Idiopathic thrombocytopenic | Platelet integrin Gpllb, Gpllla |
| purpura | |
| Insulin resistant diabetes | Insulin receptor |
| Membranous nephritis | Phospholipase AZ |
| mixed essential | rheumatoid factor IgG complexes |
| cryoglobulinemia | |
| multiple sclerosis | Myelin basic protein, proteolipid protein, myelin |
| | oligodendrocyte glycoprotein |
| myasthenia gravis | Acetylcholine receptor |
| Myasthenia gravis-MUSC | Muscarinic receptor |
| pemphigus/pemphigoid | Epidermal cadherin |
| pernicious anemia | intrinsic factor (Gastric) |
| polymyositis | nuclear and nucleolar antigen |
| primary biliary cirrhosis | neutrophil nuclear antigen, mitochondrial multienzyme |
| | complex |
| psoriasis | PSO p27 |
| rheumatoid arthritis | rheumatoid factor IgG complexes, synovial joint antigen, |
| | citrullinated protein, carbamylated protein |
| scleroderma/systemic | Sc1-86, nucleolar scleroderma antigen |
| sclerosis | |
| Sjogren's syndrome | SS-B, tupus La protein |
| systemic lupus erythematosus | DNAr histones, ribosomes, snRNP, scRNP |
| vitiligo | VIT-90, VIT-75, VIT-40 |
| Wegener's granulomatosis | neutrophil nuclear antigen |
| Antiphospholipid syndrome | Beta-2 glycoprotein 1 |
| (APS) & catastrophic APS | |
| Chemotherapy induced | Neuronal antigens |
| peripheral neuropathy | |
| Atypical hemolytic uremic | Complement factor H |
| syndrome | |
| Thrombotic | ADAMTS13 |
| thrombocytopenic purpura | |

[0829] In certain embodiments, an aAPC of the invention is used to drive tolerance induction in subjects with Type I diabetes. In one particular embodiment, an artificial antigen presenting cell comprises an erythroid cell, wherein the erythroid cell presents, e.g. comprises on the cell surface, at least one exogenous antigenic polypeptide, wherein the antigenic peptide is insulin B-chain, and in particular a portion of the insulin B-chain. In certain embodiments, the portion of the insulin B-chain is amino acids 9-23 of insulin B-chain. In some embodiments, the erythroid cell is an enucleated cell. In some embodiments, the erythroid cell is a nucleated cell.

[0830] Diseases of immune activation also include inflammatory diseases, such as, e.g. Crohn's disease, ulcerative colitis, celiac disease, or other idiopathic inflammatory bowel disease. Diseases of immune activation also include allergic diseases, such as, e.g. asthma, peanut allergy, shellfish allergy, pollen allergy, milk protein allergy, insect sting allergy, and latex allergy, animal dander allergy, black and English walnut allergy, brazil nut allergy, cashew nut allergy, chestnut allergy, dust mite allergy, egg allergy, fish allergy, hazelnut allergy, mold allergy, pollen allergy, grass allergy, shellfish allergy, soy allergy, tree nut allergy and wheat allergy.

[0831] Diseases of immune activation also include immune activation in response to a therapeutic protein administered to treat a primary condition, that lessens the efficacy of therapeutic protein, such as, e.g., clotting factor VIII in hemophilia A, clotting factor IX in hemophilia B, antitumor necrosis factor alpha (TNFα) antibodies in rheumatoid arthritis and other inflammatory diseases, glucocerebrosidase in Gaucher's disease, any recombinant protein used for enzyme replacement therapy, or asparaginase in acute lymphoblastic leukemia (ALL).

[0832] In some embodiments a patient is suffering from an autoimmune disease or condition or a self-antibody mediated disease or condition, in which the patient's immune system is active against an endogenous (self) molecule, for example a protein antigen, such that the immune system attacks the endogenous molecule, induces inflammation, damages tissue, and otherwise causes the symptoms of the autoimmune or self-antibody disease or conditions. The immune response might be driven by antibodies that bind to the endogenous molecule, or it may be driven by overactive T cells that attack cells expressing the endogenous molecule, or it may be driven by other immune cells such as regulatory T cells, NK cells, NKT cells, or B cells. In these embodiments, an antigenic protein or a fragment thereof corresponding to the endogenous (self) molecule may be expressed on an aAPC comprising an erythroid cell, presenting (e.g. comprising on the cell surface) one or more exogenous polypeptides, as described herein. The aAPCs, when administered once or more to the patient suffering from the disease or condition, would be sufficient to induce tolerance to the antigenic protein such that it no longer induced activation of the immune system, and thus would treat or ameliorate the symptoms of the underlying disease or condition. In certain embodiments, the aAPCs are used to stimulate T regulatory cells, thereby biasing the immune system back to a more tolerogenic state for the endogenous (self) molecule.

[0833] In some embodiments, a patient is suffering from an allergic disease, for example an allergy to animal dander, black walnut, brazil nut, cashew nut, chestnut, dust mites, egg, english walnut, fish, hazelnut, insect venom, latex, milk, mold, peanuts, pollen, grass, shellfish, soy, tree nuts, or wheat. A patient suffering from an allergy may mount an immune response upon contact with the antigenic fragment of the allergen, for example through diet, skin contact, injection, or environmental exposure. The immune response may involve IgE antibody, sensitized mast cells, degranulation, histamine release, and anaphylaxis, as well as canonical immune cells like T cells, B cells, dendritic cells, T regulatory cells, NK cells, neutrophils, and NKT cells. The allergic reaction may cause discomfort or it may be severe enough to cause death, and thus requires constant vigilance on the part of the sufferer as well as his or her family and caretakers. In these embodiments, the antigenic protein or a fragment thereof may be presented on an erythroid cell of the aAPC of the present disclosure. A population of these cells, when administered once or more to the patient suffering from the allergic disease or condition, would be sufficient to induce tolerance to the antigenic protein such that it no longer induced activation of the immune system upon exposure, and thus would treat or ameliorate the symptoms of the underlying allergic disease or condition.

[0834] Autoimmune Diseases Associated with an Infectious Agent

[0835] In some embodiments, the disclosure provides methods for treating an autoimmune disease or disorder associated with or triggered by an infectious agent. Exemplary autoimmune diseases or disorders associated with or triggered by infectious agents are provided in Table 19.

TABLE 19
Autoimmune diseases and associated infectious agents.

| Autoimmune Disease | Infectious Agent(s) |
|---|---|
| Allergic encephalitis | Measles virus |
| Autoimmune kidney disease | Streptococcal infections |
| Chagas disease | Trypanosoma cruzi |
| Chronic autoimmune hepatitis | Hepatitis C virus |
| Guillain-Barré syndrome | Campylobacter jejuni, Cytomegalovirus, |
| | Zika virus |
| Herpetic stromal keratitis | Herpes simplex virus |
| HTLV-associated myelopathy | Human T-cell leukemia virus |
| Lyme arthritis | Borrelia burgdorferi |
| Mixed cryoglobulinemia | Hepatitis C virus |
| Myocarditis | Coxsackie virus B3 |
| Pediatric autoimmune | Streptococcal infections |
| neuropsychiatric disorders | |
| Polyarteritis nodosa | Hepatitis B virus |
| Primary biliary cirrhosis | Escherichia coli |
| Reactive arthritis | Yersinia enterocolitica |
| Reiter's syndrome | Chlamydia trachomatis, Shigella species |
| Rheumatic fever | Streptococcus pyogenes |
| Rheumatic heart disease | Sreptococci |
| Rheumatoid arthritis | Normal gut flora |
| Scleroderma | Cytomegalovirus |
| Tourette syndrome | Streptococcal infections |
| Type 1 diabetes | Enterovirus, Rotavirus |
| Type 1 diabetes mellitus | Coxsackie virus B4 |

[0836] Any autoimmune disorder associated with an infectious agent, including without limitation those disorders presented in Table 19, is contemplated to be treated with an aAPC of the invention.

[0837] As provided by the present disclosure, an autoimmune disease associated with an infectious agent may be treated by administering to the subject an aAPC comprising a first exogenous polypeptide comprising an antigen-presenting polypeptide (e.g., an MHC molecule such as MHCI or MHCII), and a second exogenous polypeptide comprising an antigen or fragment thereof from the infectious agent (i.e., targeting the specific infectious agent triggering the disease).

[0838] In a particular embodiment, the aAPC useful for treating an autoimmune disorder associated with an infectious agent further comprises a third exogenous polypeptide comprising at least one costimulatory polypeptide. In an embodiment, the costimulatory polypeptide activates cytotoxic CD8+ T cells in order to target and eliminate cells infected with the infectious agent. For example, the cytotoxic CD8+ T cells may target, suppress and/or eliminate autoreactive B cells infected with the infectious agent. The costimulatory polypeptide may be any costimulatory polypeptide described herein. In embodiments, the at least one exogenous costimulatory polypeptide expands cytotoxic CD8+ T cells. In some embodiments, the exogenous costimulatory polypeptide is selected from the costimulatory polypeptides listed in Table 6. In some embodiments, the costimulatory polypeptides is selected from the group consisting of 4-1BBL, LIGHT, anti CD28, CD80, CD86, CD70, OX40L, IL-7, IL-12, GITRL, TIM4, SLAM, CD48, CD58, CD83, CD155, CD112, IL-15Rα fused to IL-15, IL-21, ICAM-1, a ligand for LFA-1, anti CD3, and a combination thereof.

[0839] In some embodiments, the autoimmune disease associated with an infectious agent is multiple sclerosis (MS). Several infectious agents have been associated with MS. Exemplary infectious agents associated with MS are provided in Table 20. In embodiments, the infectious agent associated with the autoimmune disorder is a virus.

TABLE 20
Infectious agents associated with
multiple sclerosis (MS)

| Infectious Agent | Antigenic Peptides |
|---|---|
| Borna virus | |
| Coronavirus | |
| Cytomegalovirus | |
| EBV | VLQWASLAV (SEQ ID NO: 698), |
| | FMVFLQTHI (SEQ ID NO: 699), |
| | FLQTHIFAEV (SEQ ID NO: 700), |
| | or SIVCYFMVFL |
| | (SEQ ID NO: 701) |
| Hepatitis B virus | |
| Herpes simplex virus, | |
| type 1 | |
| Herpes simplex virus, | |
| type 2 | |
| HHV-6 | PRTPPPS (SEQ ID NO: 719) |
| HTLV-1 | |
| Influenza A virus | |
| LM7 virus | |
| Measles virus | |
| MS1533 | |
| MSRV (HERV-W) | |
| Parainfluenza virus 1 | |
| Rabies virus | |
| Rubella virus | |
| Scrapie agent | |
| Simian virus 5 | |
| SMON-like virus | |
| Tick borne | |
| encephalitis virus | |
| Torque Teno virus | |
| VZV | |

[0840] In some embodiments, the present disclosure provides a method of treating a subject having MS, comprising administering to the subject an effective number of aAPCs comprising an erythroid cell (e.g. an enucleated erythroid cell), comprising one or more exogenous polypeptides, wherein one of the one or more exogenous polypeptides comprises an antigen from an infectious agent listed in Table 20, or an immunogenic peptide thereof, thereby treating the MS. In embodiments, the aAPCs further comprise an MHC molecule, and optionally a costimulatory polypeptide.

[0841] In a particular embodiment, the infectious agent associated with MS is Epstein-Barr virus (EBV). While not wishing to be bound by any particular theory, it is believed that during primary infection, EBV infects autoreactive naive B cells in tonsils driving them to enter germinal centers where they proliferate intensely and differentiate into latently infected autoreactive memory B cells, which then exit from the tonsils and circulate in the blood. The number of EBV-infected B cells is normally controlled by EBV-specific cytotoxic CD8+ T cells, which kill proliferating and lytically infected B cells, but not if there is a defect in this defense mechanism. Surviving EBV-infected autoreactive memory B cells enter the CNS where they take up residence and produce oligoclonal IgG and pathogenic autoantibodies, which attack myelin and other components of the CNS. Autoreactive T cells that have been activated in peripheral lymphoid organs by common systemic infections circulate in the blood and enter the CNS where they are reactivated by EBV-infected autoreactive B cells presenting CNS peptides (Cp) bound to major histocompatibility complex (MHC) molecules. These EBV-infected B cells provide costimulatory survival signals (B7) to the CD28 receptor on the autoreactive T cells and thereby inhibit activation-induced T-cell apoptosis, which normally occurs when autoreactive T cells enter the CNS and interact with nonprofessional antigen-presenting cells such as astrocytes and microglia which do not express B7 costimulatory molecules. After the autoreactive T cells have been reactivated by EBV-infected autoreactive B cells, they produce cytokines such as interleukin-2 (IL-2) interferon-γ (IFNγ) and tumor necrosis factor (TNF) and orchestrate an autoimmune attack on the CNS with resultant oligodendrocyte and myelin destruction.

[0842] Accordingly, in some embodiments, the present disclosure provides a method of treating a subject having MS, comprising administering to the subject an effective number of aAPCs comprising an erythroid cell (e.g. an enucleated erythroid cell), comprising one or more exogenous polypeptides, wherein one of the one or more exogenous polypeptides comprises an EBV antigen. In some embodiments, the present disclosure provides a method of treating a subject having MS, comprising administering to the subject an effective number of aAPCs comprising an erythroid cell (e.g. an enucleated erythroid cell), comprising one or more exogenous polypeptides, wherein one of the one or more exogenous polypeptides comprises an EBV antigen from Table 1. In some embodiments, the present disclosure provides a method of treating a subject having MS, comprising administering to the subject an effective number of aAPCs comprising an erythroid cell (e.g. an enucleated erythroid cell), comprising one or more exogenous polypeptides, wherein one of the one or more exogenous polypeptides comprises an EBV antigen selected from a gp350 or EBNA1 antigen. In some embodiments, the present disclosure provides a method of treating a subject having MS, comprising administering to the subject an effective number of aAPCs comprising an erythroid cell (e.g. an enucleated erythroid cell), comprising one or more exogenous polypeptides, wherein one of the one or more exogenous polypeptides comprises an EBV antigen selected from: VLQWASLAV (SEQ ID NO: 698), FMVFLQTHI (SEQ ID NO: 699), FLQTHIFAEV (SEQ ID NO: 700), SIVCYFMVFL (SEQ ID NO: 701), CLGGLLTMV (SEQ ID NO: 691), GLCTLVAML (SEQ ID NO: 692), FLYALALLL (SEQ ID NO: 693), YVLDHLIVV (SEQ ID NO: 694), RLRAEAQVK (SEQ ID NO: 695), AVFDRKSDAK (SEQ ID NO: 696), RPPIFIRLL (SEQ ID NO: 697). Such aAPCs are expected to eliminate the EBV-infected autoreactive B cells, to thereby treat the MS. In embodiments, the aAPCs further comprise an MHC molecule, and optionally a costimulatory polypeptide. In some embodiments, the antigen from EBV is gp350 or an immunogenic peptide thereof (e.g. HLA A2 peptide VLQWASLAV (SEQ ID NO: 698)). In some embodiments, the antigen from EBV is EBNA1 or an immunogenic peptide thereof (e.g. FMVFLQTHI (SEQ ID NO: 699), FLQTHIFAEV (SEQ ID NO: 700), or SIVCYFMVFL (SEQ ID NO: 701)). In some embodiments, the antigen from EBV is FMVFLQTHI (SEQ ID NO: 699). In some embodiments, the antigen from EBV is FLQTHIFAEV (SEQ ID NO: 700). In some embodiments, the antigen from EBV is SIVCYFMVFL (SEQ ID NO: 701).

[0843] In some embodiments, the present disclosure provides a method of treating a subject having MS, comprising administering to the subject an effective number of aAPCs comprising an erythroid cell (e.g. an enucleated erythroid cell), comprising one or more exogenous polypeptides, wherein one of the one or more exogenous polypeptides comprises gp350 or an immunogenic peptide thereof, thereby treating the MS. In some embodiments, the immunogenic peptide of gp350 comprises or consists of the HLA A2 peptide VLQWASLAV (SEQ ID NO: 698). In some embodiments, the immunogenic peptide of gp350 is capable of inducing cytotoxic CD8+ T cells that recognize the gp350 antigen.

[0844] In some embodiments, the present disclosure provides a method of treating a subject having MS, comprising administering to the subject an effective number of aAPCs comprising an erythroid cell (e.g. an enucleated erythroid cell), comprising one or more exogenous polypeptides, wherein one of the one or more exogenous polypeptides comprises EBNA1 or an immunogenic peptide thereof, thereby treating the MS. In some embodiments the immunogenic peptide of EBNA1 comprises or consists of a peptide selected from FMVFLQTHI (SEQ ID NO: 699), FLQTHIFAEV (SEQ ID NO: 700), and SIVCYFMVFL (SEQ ID NO: 701). In some embodiments, the immunogenic peptide of EBNA1 is capable of inducing cytotoxic CD8+ T cells that recognize the EBNA1 antigen.

[0845] As provided herein, there are several alternative ways in which an aAPC may be designed and used to treat an autoimmune disease associated with or triggered by an infectious agent in a subject. For example, an autoimmune disease associated with an infectious agent may alternatively be treated by administering to the subject an aAPC comprising a first exogenous polypeptide comprising an antigen-presenting polypeptide (e.g., an MHC molecule such as MHCI or MHCII), a second exogenous polypeptide comprising an antigen or fragment thereof, and optionally a third exogenous polypeptide comprising at least one co-inhibitory polypeptide, or at least one Treg costimulatory polypeptide (also referred to herein as Treg expansion polypeptide). In some embodiments, the antigen or antigenic fragment thereof is from the infectious agent (i.e., targeting the infectious agent triggering the disease). In some embodiments, the antigen or antigenic fragment thereof is an antigen associated with the infection-induced autoimmune disorder (e.g., a self-polypeptide).

[0846] In some embodiments, as described above more generally for any autoimmune disorder, the aAPC useful for treating an autoimmune disorder associated with an infectious agent comprises a Treg co stimulatory/expansion polypeptide. The Treg co stimulatory/expansion polypeptide may be any Treg expansion polypeptide described herein. In an embodiment, the Treg costimulatory/expansion polypeptide expands Tregs that, in turn, suppress T cells generated in the subject in response to the infectious agent.

[0847] In some embodiments, as described above more generally for any autoimmune disorder, the aAPC useful for treating an autoimmune disorder associated with an infectious agent comprises a co-inhibitory polypeptide. The co-inhibitory polypeptide may be any co-inhibitory polypeptide described herein. In an embodiment, the co-inhibitory polypeptide suppresses T cells generated in the subject in response to the infectious agent.

[0848] In another embodiment, the autoimmune disease is not associated with an infectious agent. For an autoimmune disease that is not associated with an infectious agent, one of skill in the art will recognize, based on the disclosure elsewhere herein, that the autoimmune disease may be treated by administering to the subject an aAPC comprising a first exogenous polypeptide comprising an antigen-presenting polypeptide (e.g., an MHC molecule such as MHCI or MHCII), a second exogenous polypeptide comprising an antigen or fragment thereof (e.g., an antigenic polypeptide from the endogenous (self) polypeptide to which the autoimmune activity is directed) and a third exogenous polypeptide comprising at least one coinhibitory polypeptide or at least one Treg expansion polypeptide. In these embodiments, the aAPCs are administered to the subject in order to induce peripheral tolerance to the antigen triggering the autoimmune response.

[0849] Infectious Diseases

[0850] In certain embodiments, the present disclosure provides an aAPC comprising an erythroid cell (e.g. an enucleated erythroid cell) or an enucleated cell, comprising one or more exogenous polypeptides, wherein one of the one or more exogenous polypeptides comprises an infectious disease therapeutic. In some embodiments, the erythroid cell is an enucleated erythroid cell. In some embodiments, the erythroid cell is a nucleated erythroid cell.

[0851] “Infectious disease therapeutic” as used herein, refers to an exogenous polypeptide which inhibits an infectious disease, e.g., reduces or alleviates a cause or symptom of an infectious disease, or improves a value for a parameter associated with the infectious disease, e.g., viral load or bacterial load. In embodiments, the infectious disease therapeutic is a first or second exogenous polypeptide, which when present or expressed with the other exogenous polypeptide, inhibits an infectious disease. In an embodiment, a first or second infectious disease therapeutic has activity in the absence of the other. In embodiments, the infectious disease therapeutic inhibits the infectious disease directly, e.g., by killing pathogens. In embodiments, the infectious disease therapeutic inhibits the infectious disease by stimulating a subject's immune response, e.g., as a vaccine.

[0852] In some embodiments, the aAPC comprises a first exogenous polypeptide comprising a first infectious disease therapeutic and a second exogenous polypeptide, comprising a second infectious disease therapeutic. In some embodiments, the aAPC comprises a first exogenous polypeptide comprising a first infectious disease therapeutic, a second exogenous polypeptide, comprising a second infectious disease therapeutic, and a third exogenous polypeptide, comprising a third infectious disease therapeutic.

[0853] The first, second and third infectious disease therapeutic can act on the same target, for example a cell surface receptor and/or an endogenous human protein. Alternatively, the first, second and third anti-cancer therapeutic can act on different targets. The first, second or third targets may be members of the same biological pathway, wherein optionally the targets are cell surface receptors, endogenous human proteins. The first, second or third targets may be on different cell types. In some embodiments, the first exogenous polypeptide localizes the engineered erythroid cell to a desired site, e.g., a human cell, and the second exogenous polypeptide has a therapeutic activity, e.g., antigen presenting activity.

[0854] In certain preferred embodiments, the infectious disease therapeutic is an antigen, e.g., an antigen from a pathogen or infectious agent (where “pathogen” and “infectious agent” are used interchangeably herein). In some embodiments, the first therapeutic is an antigen, e.g., an antigen from a pathogen. In some embodiments, the first therapeutic and second therapeutic is an antigen, e.g., an antigen from a pathogen. In certain embodiments, the first, second and third therapeutic is an antigen, e.g., an antigen from a pathogen.

[0855] In embodiments, the aAPC further comprises an additional exogenous polypeptide wherein the additional exogenous polypeptide comprises an antigen-presenting polypeptide, e.g., an MHC molecule (e.g. MHCI or MHCII). In embodiments, the aAPC further comprises an additional exogenous polypeptide, wherein the additional exogenous polypeptide comprises at least one costimulatory polypeptide. In some embodiments, the aAPC further comprises an additional exogenous polypeptide comprising an antigen-presenting polypeptide and an additional exogenous polypeptide comprising at least one costimulatory polypeptide.

[0856] In some embodiments, the aAPC comprises a first exogenous polypeptide comprises an antigen-presenting polypeptide, e.g., an MHC molecule (e.g. MHCI or MHCII), and the second exogenous polypeptide comprises an antigen. In various embodiments, the antigen is an antigen of a pathogen, e.g., a viral pathogen, a bacterial pathogen, a fungal pathogen, or a parasitic pathogen.

[0857] It is encompassed by the present invention that the antigen may be any pathogenic antigen, or antigenic-portion thereof, known in the art. Exemplary pathogens for which one or more antigenic peptides can be presented on an erythroid cell of the invention are described in detail below, but are not intended to be limiting. In various embodiments, the antigenic peptide is from a pathogen provided in any one of Tables 21, 22, 23 and 24 below. In some embodiments, the antigenic peptide is from a pathogen provided in Table 21. In some embodiments, the antigenic peptide is from a pathogen provided in Table 22. In some embodiments, the antigenic peptide is from a pathogen provided in Table 23. In some embodiments, the antigenic peptide is from a pathogen provided in Table 24. It will be recognized by the skilled artisan that an aAPC as provided herein, comprising an antigen from a particular pathogen or infectious agent, can be administered to a subject to treat an infection in the subject caused by that pathogen or infectious agent. It will be further recognized by the skilled artisan that an aAPC as provided herein, comprising an antigen from a particular pathogen or infectious agent, can be administered to a subject to treat a disease or disorder in the subject, wherein the disease, disorder is caused, directly or indirectly, by infection with that pathogen or infectious agent.

[0858] In some aspects, the disclosure provides an method of treating a subject having an infectious disease, comprising administering to the subject an effective number of the erythroid cells described herein to the subject, thereby treating the infectious disease.

[0859] In another aspect, the present disclosure provides a method of treating a subject having an infectious disease, comprising administering to the subject an effective number of aAPCs comprising an erythroid cell (e.g., an enucleated erythroid cell) or an enucleated cell, comprising one or more exogenous polypeptides, wherein one of the one or more exogenous polypeptides comprises a pathogenic antigen, thereby treating the infectious disease.

[0860] In certain embodiments, the infectious disease therapeutic is selected from an antimicrobial polypeptide listed on a publicly available bioinformatic database, such as CAMP, CAMP release 2 (Collection of sequences and structures of antimicrobial peptides), the Antimicrobial Peptide Database (found at aps.unmc.edu/AP/main.php), LAMP, BioPD, and ADAM (A Database of Anti-Microbial peptides) (found at bioinformatics.cs.ntou.edu.tw/adam/). The Antimicrobial peptide databases may be divided into two categories on the basis of the source of peptides it contains, as specific databases and general databases. These databases have various tools for antimicrobial peptides analysis and prediction. For example, CAMP contains AMP prediction, feature calculator, BLAST search, clustalW, VAST, PRATT, Helical wheel etc. In addition, ADAM allows users to search or browse through AMP sequence-structure relationships.

[0861] In certain embodiments, the infectious disease therapeutic is selected from a viral polypeptide. In these embodiments, an aAPC comprises an erythroid cell (e.g., an enucleated erythroid cell) or an enucleated cell, comprising one or more exogenous polypeptides, wherein one of the one or more exogenous polypeptides comprises an antigenic viral polypeptide, and the aAPC is administered to a subject to treat an infection with the virus.

[0862] Viral infections include adenovirus, coxsackievirus, hepatitis A virus, poliovirus, Epstein-Barr virus, herpes simplex type 1, herpes simplex type 2, human cytomegalovirus, human herpesvirus type 8, varicella-zoster virus, hepatitis B virus, hepatitis C viruses, human immunodeficiency virus (HIV), influenza virus, measles virus, mumps virus, parainfluenza virus, respiratory syncytial virus, papillomavirus, rabies virus, and Rubella virus. Other viral targets include Paramyxoviridae (e.g., pneumovirus, morbillivirus, metapneumovirus, respirovirus or rubulavirus), Adenoviridae (e.g., adenovirus), Arenaviridae (e.g., arenavirus such as lymphocytic choriomeningitis virus), Arteriviridae (e.g., porcine respiratory and reproductive syndrome virus or equine arteritis virus), Bunyaviridae (e.g., phlebovirus or hantavirus), Caliciviridae (e.g., Norwalk virus), Coronaviridae (e.g., coronavirus or torovirus), Filoviridae (e.g., Ebola-like viruses), Flaviviridae (e.g., hepacivirus or flavivirus), Herpesviridae (e.g., simplexvirus, varicellovirus, cytomegalovirus, roseolovirus, or lymphocryptovirus), Orthomyxoviridae (e.g., influenza virus or thogotovirus), Parvoviridae (e.g., parvovirus), Picomaviridae (e.g., enterovirus or hepatovirus), Poxviridae (e.g., orthopoxvirus, avipoxvirus, or leporipoxvirus), Retroviridae (e.g., lentivirus or spumavirus), Reoviridae (e.g., rotavirus), Rhabdoviridae (e.g., lyssavirus, novirhabdovirus, or vesiculovirus), and Togaviridae (e.g., alphavirus or rubivirus). Specific examples of these viruses include human respiratory coronavirus, influenza viruses A-C, hepatitis viruses A to G, and herpes simplex viruses 1-9.

[0863] Exemplary viral pathogens are shown below in Table 21. In certain embodiments, the viral pathogen is selected from Hepatitis B virus, Hepatitis C virus, Epstein Barr virus, Cytomegalovirus (CMV).

TABLE 21
Viral Pathogens

| | Examples, by | |
|---|---|---|
| Baltimore | Family | |
| classification | (Human Host) | Species/Pathology example |
| dsDNA viruses | Adenoviridae | Example Respiratory infection |
| dsDNA viruses | Polyomaviridae | Example - progressive multifocal |
| | | leukoencephalopathy |
| dsDNA viruses | Papiliomaviradae | Example - betapapilloma virus (warts, malignant |
| | | tumors) |
| dsDNA viruses | Poxviridae | Example - Molluscum contagiosum (skin lesions) |
| dsDNA viruses | Herpesvirales | Example - Varicellovirus (Chickenpox) |
| ssDNA viruses | Anelloviridae | Asymptomatic, may be associate with hepatitis, |
| (+strand or “sense”) | | pulmonary disease, hematological disorders, |
| DNA | | myopathy, lupus |
| ssDNA viruses | Parvoviridae | Example - Fifth disease |
| (+strand or “sense”) | | |
| DNA | | |
| dsRNA | Reoviridae | Example - Colorado tick fever |
| viruses (e.g. Reoviruses) | | |
| (+)ssRNA viruses | Coronaviridae | Example - Pneumonia, gastroenteritis |
| (+strand or sense) RNA | | |
| (+)ssRNA viruses | Picornaviridae | Example - Myocarditis |
| (+strand or sense) RNA | | |
| (+)ssRNA viruses | Astoviridae | Example - infantile gastroenteritis |
| (+strand or sense) RNA | | |
| (+)ssRNA viruses | Caliciviridae | Example - Norovirus - gastroenteritis |
| (+strand or sense) RNA | | |
| (+)ssRNA viruses | Flaviviridae | Example - Dengue, Zika |
| (+strand or sense) RNA | | |
| (+)ssRNA viruses | Hepeviridae | Example - Hepatits |
| (+strand or sense) RNA | | |
| (+)ssRNA viruses | Togaviridae | Example - Rubella |
| (+strand or sense) RNA | | |
| (−)ssRNA viruses | Rhabdoviridae | Example - Rabies |
| (−strand or antisense) | | |
| RNA | | |
| (−)ssRNA viruses | Filoviridae | Example - Ebola, Marburg |
| (−strand or antisense) | | |
| RNA | | |
| (−)ssRNA viruses | Paramyxoviridae | Example - Mumps |
| (−strand or antisense) | | |
| RNA | | |
| (−)ssRNA viruses | Pneumovirinae | Example - Respiratory tract infection |
| (−strand or antisense) | | |
| RNA | | |
| (−)ssRNA viruses | Arenaviridae | Example - Enchephalitis, Hemorrhagic fever |
| (−strand or antisense) | | |
| RNA | | |
| (−)ssRNA viruses | Bunyaviridae | Example - Hantavirus pulmonary syndrome/ |
| (−strand or antisense) | | hemorrhagic fever |
| RNA | | |
| (−)ssRNA viruses | Deltavirus | Example - hepatitis, cirrhosis |
| (−strand or antisense) | | |
| RNA | | |
| (−)ssRNA viruses | Orthomyxoviridae | Example - Influenza A, Influenza B |
| (−strand or antisense) | | |
| RNA | | |
| ssRNA-RT viruses | Retroviridae | Example - lentivirus - HIV |
| (+strand or sense) RNA | | |
| with DNA | | |
| intermediate in life- | | |
| cycle | | |
| dsDNA-RT viruses | Hepadnaviridae | Example disease - hepatitis, cirrhosis, hepatocellular |
| | | carcinoma |

[0864] In certain embodiments, the antigens are selected from viral, retroviral, and testes antigens. For example, in certain embodiments, the virus is selected from Epstein Barr virus (EBV), hepatitis B (HBV), hepatitis C (HCV), human papilloma virus (HPV), Kaposi sarcoma virus (KSV), and polyoma viruses. In some embodiments, the virus is hepatitis B (HBV). In some embodiments, the present disclosure provides a method of treating a subject having a cancer associated with an oncogenic virus (e.g. HPV), comprising administering to the subject an effective number of aAPCs comprising an erythroid cell (e.g. an enucleated erythroid cell), comprising one or more exogenous polypeptides, wherein one of the one or more exogenous polypeptides comprises an HPV antigen from Table 1. In some embodiments, the present disclosure provides a method of treating a subject having a cancer associated with an oncogenic virus (e.g. HPV), comprising administering to the subject an effective number of aAPCs comprising an erythroid cell (e.g. an enucleated erythroid cell), comprising one or more exogenous polypeptides, wherein one of the one or more exogenous polypeptides comprises an HPV-E7 antigen. In some embodiments, the present disclosure provides a method of treating a subject having a cancer associated with an oncogenic virus (e.g. HPV), comprising administering to the subject an effective number of aAPCs comprising an erythroid cell (e.g. an enucleated erythroid cell), comprising an exogenous polypeptide, wherein the exogenous polypeptide comprises YMLDLQPET (SEQ ID NO: 713), YMLDLQPETT (SEQ ID NO: 714), or TIHDIILECV (SEQ ID NO: 712). In some embodiments, the exogenous polypeptide comprises YMLDLQPET (SEQ ID NO: 713). In some embodiments, the exogenous polypeptide is YMLDLQPET (SEQ ID NO: 713).

[0865] In some embodiments, the present disclosure provides a method of treating a subject having a viral infection, comprising administering to the subject an effective number of aAPCs comprising an erythroid cell (e.g. an enucleated erythroid cell), comprising one or more exogenous polypeptides, wherein one of the one or more exogenous polypeptides comprises an antigen from an infectious agent listed in Table 21, or an immunogenic peptide thereof, thereby treating the viral infection. In embodiments, the aAPCs further comprise an MHC molecule, and optionally a costimulatory polypeptide.

[0866] In some embodiments, the present disclosure provides methods for treating hepatitis B infection, e.g., chronic HBV infection. It is estimated that up to 250 million people worldwide have chronic hepatitis B, which is primarily transmitted in utero or during childbirth. Chronic HBV causes cirrhosis and hepatocellular carcinoma. The pathology of HBV may be due to hepatitis B antigen-specific T cell recruitment of nonantigen-specific T cells, which secrete cytokines causing liver damage. It has been proposed that exhausted T cells are key to the etiology of chronic hepatitis. HBV-specific T cells have been reported to be reactivated by PD1 blockade, e.g., by anti-PD1, and/or IL-12 (Schirdewahn et al. J. Infect. Dis. 2017; Fisicaro et al Gastroenterology 2010; and Schurich PLOS Pathogens, 2013, the entire contents of each of which is incorporated herein by reference). Thus, it is envisioned by the present invention that aAPCs provided herein may be used to treat chronic HBV by reactivating HBV-specific T cells, e.g., for cytolytic or non-cytolytic anti-viral activity.

[0867] Accordingly, In some embodiments, the present disclosure provides a method of treating a subject having a Hepatitis B viral (HBV) infection, e.g., chronic hepatitis B, comprising administering to the subject an effective number of aAPCs comprising an erythroid cell (e.g. an enucleated erythroid cell), comprising one or more exogenous polypeptides, wherein one of the one or more exogenous polypeptides comprises an HBV-specific antigen, or an immunogenic peptide thereof, thereby treating the HBV infection. In some embodiments, the HBV infection is a chronic HBV infection. In embodiments, the aAPCs further comprise an exogenous antigen-presenting polypeptide, i.e., an MHC molecule, e.g., MHC class I or MHC class I single chain fusion. In some embodiments, the aAPC further comprises at least one exogenous costimulatory polypeptide. In embodiments, the at least one costimulatory polypeptide is selected from the group consisting of 4-1BBL, IL-2, IL-12, IL-15, IL-18, IL-21, and any combination thereof, e.g., IL-12 and IL-15, or 4-1BBL and IL-15. In some embodiments, the aAPC further comprises an additional exogenous polypeptide, wherein the additional exogenous polypeptide comprises a checkpoint inhibitor. In some embodiments, the checkpoint inhibitor is an antibody molecule to PD1. In a particular embodiment, the aAPC comprises an erythroid cell comprising one or more exogenous polypeptides, wherein the one or more exogenous polypeptides comprise: an exogenous antigenic polypeptide comprising an HBV-specific antigen, or an immunogenic peptide thereof, an exogenous antigen-presenting polypeptide, e.g., MHC class I or MHC class I single chain fusion, an exogenous costimulatory polypeptide, e.g., IL-12 or 4-1BBL, and a checkpoint inhibitor, e.g., antibody to PD1.

[0868] In certain embodiments, the infectious disease therapeutic is selected from a bacterial polypeptide. In these embodiments, an aAPC comprises an erythroid cell (e.g., an enucleated erythroid cell) or an enucleated cell, comprising one or more exogenous polypeptides, wherein one of the one or more exogenous polypeptides comprises an antigenic bacterial polypeptide, and the aAPC is administered to a subject to treat an infection with the bacteria.

[0869] Bacterial infections include, but are not limited to, Mycobacteria, Rickettsia, Mycoplasma, Neisseria meningitides, Neisseria gonorrheoeae, Legionella, Vibrio cholerae, Streptococci, Staphylococcus aureus, Staphylococcus epidermidis, Pseudomonas aeruginosa, Corynobacteria diphtheriae, Clostridium spp., enterotoxigenic Eschericia coli, Bacillus anthracis, Rickettsia, Bartonella henselae, Bartonella quintana, Coxiella burnetii, chlamydia, Mycobacterium leprae, Salmonella; shigella; Yersinia enterocolitica; Yersinia pseudotuberculosis; Legionella pneumophila; Mycobacterium tuberculosis; Listeria monocytogenes; Mycoplasma spp.; Pseudomonas fluorescens; Vibrio cholerae; Haemophilus influenzae; Bacillus anthracis; Treponema pallidum; Leptospira; Borrelia; Corynebacterium diphtheriae; Francisella; Brucella melitensis; Campylobacter jejuni; Enterobacter; Proteus mirabilis; Proteus; and Klebsiella pneumoniae.

[0870] Exemplary bacterial pathogens are shown below in Table 22.

TABLE 22
Bacterial Pathogens

| Phylum | By Genus | Species/Pathology Example |
|---|---|---|
| Proteobacteria | Erlichia | Erlichosis (Pain, malaise, fever gastrointestinal disorder, |
| | | confusion rash. Can be fatal) |
| Proteobacteria | Rickettsia | Two groups of diseases from different subspecies - Spotted |
| | | fever; Typhus |
| Proteobacteria | Brucella | Brucellosis. 4 known species cause disease in humans. |
| | | Can be sporadic or chronic. Fever, malaise, lesions |
| Proteobacteria | Bartonella | Multiple species. Pathophysiology includes endocarditis, |
| | | neuroretinitis, cat scratch disease, peliosis hepititus, |
| | | general bactermia angiomatosis, Carrion's disease, Trench |
| | | fever |
| Proteobacteria | Bordetella | Multiple species. Adherence to ciliated ephilium drives |
| | | respiratory tract infections. B. pertussis = subspecies |
| | | example |
| Proteobacteria | Neisseria | Includes N meningitidis (bacterial meningitis and |
| | | septicemia) and N gonorrheae (Gonorrhea) - colonize |
| | | mucosal surfaces |
| Proteobacteria | Francisella | Examples include f. tularensis (tularemia), F novicida, F |
| | | philomiragia (septicemia) |
| Proteobacteria | Legionella | Examples include L pneumophila - legionnaires disease |
| | | and pontiac fever |
| Proteobacteria | Coxiella | Coxiella burnetii - Q Fever |
| Proteobacteria | Moraxella | Examples include M. catarrhalis (lower respiratory tract |
| | | infection) and Moraxella lacunata (blepharoconjunctivitis) |
| Proteobacteria | Pseudomonas | Multiple groups and subspecies therein. Examples include |
| | | P. aeruginosa - opportunistic infection in cystic fobrosis, |
| | | burn and immunocompromised patients. Colonizes skin, |
| | | lungs, kidney, urinary tract. Found on most medical |
| | | equipment - develops enduring biofilms |
| Proteobacteria | Vibrio | Multiple species - foodborne disease generally implicated |
| | | with gastroenteritis - example - V. cholerae. Can also |
| | | cause septicemia in open wounds |
| Proteobacteria | Plesimonas | Example P. Shigelloides - causes gastrointestinal disease |
| Proteobacteria | Aeromonas | Cornucopia of human disease including and not limited to |
| | | gastrointestinal disease, wound and soft tissue infection, |
| | | blood borne dyscrasias |
| Proteobacteria | Citrobacter | Examples: C. freundii, C. koseri, C. amalonaticus. Infect |
| | | urinary tract, can cause infant meningitis and sepsis |
| Proteobacteria | Enterobacter | Multiple species - Urinary and respiratory tract infections |
| | | are most common. Example E. aerogenes are a common |
| | | source of opportunistic and/or nosocomial infections |
| Proteobacteria | Escerichia | Common cause of gastrointestinal infections. Example E. coli |
| Proteobacteria | Klebsiella | Multiple species and sub-species. Cause a variety of |
| | | opporuntistic infections: Pneumonia, UTI, septicemia, |
| | | meningitis, diarrhea, soft tissue infection |
| Proteobacteria | Proteus | Urinary tract infections (including kidney) - P. vulgaris, P. mirabilis, |
| | | P. penneri |
| Proteobacteria | Providencia | Multiple species cause. Urinary tract infections. Example: |
| | | P. stuartii |
| Proteobacteria | Morganella | Single species with 2 subspecies. M. morganii. Cause |
| | | opportunistic infections (wound, UTI) |
| Proteobacteria | Salmonella | Two species S. bongori and S. enterica, along with |
| | | multiple subspecies. Typical non-typhoidal salmonella |
| | | causes gastrointestinal disease. In developing countries it |
| | | also causes blood infections. Typhiidal disease causes |
| | | typhoid fever, hypovolemic shock, septic shock |
| Proteobacteria | Serratia | Multiple species: Opportunisitc infection that often |
| | | develops biofilms. Colonizes respiratory and urinary tract. |
| | | Responsible for 2% of nosocomial infections of blood, |
| | | LRT, UT, surgical wounds, skin and soft tissue infection. |
| | | Example s. marcescens |
| Proteobacteria | Shigella | 4 species. Causes shigellosis (leading bacterial cause of |
| | | diarrhea). Example: S. dysenteriae |
| Proteobacteria | Yersinia | Multiple species and sub-species. Example: Y. pestis |
| | | causes the plague |
| Proteobacteria | Pasteurella | Multiple species. P. multocida species is the most frequent |
| | | example of human infection (-symptoms include |
| | | swelling, cellulitis, wound drainage and arthritis) |
| Proteobacteria | Hemophilus | Multiple species. Example H influenzae (Hib) causes |
| | | penumonia, sepsis and bacterial meningitis in young |
| | | children |
| Proteobacteria | Campylobacter | Multiple species. Cause campylobacteriosis |
| | | (gastrointestinal disease - inflammatory diarrhea/ |
| | | dysentary). Example C. rectus |
| Proteobacteria | Heliobacter | Example H pylori. Causes gastritis and gastric ulcers |
| Frimicutes | Clostridia | Multiple Species. Examples: C. Difficile, C. botulinum, |
| | | C. tetani. Cause a variety of serious conditions, from |
| | | colitis to paralysis |
| Frimicutes | Mycoplasmas | Multiple species. Examples: M. genitalium, M |
| | | pneumoniae. Ureaplasma species. Associated with |
| | | sexually transmited disease, infertility and infant |
| | | respiratory distress and brain hemorrhage. P1 antigen is |
| | | primary virulence factor, which is also expressed on |
| | | erthyrocytes. This can lead to autoantibody agglutination |
| Frimicutes | Bacillus | One of the most diverse genus from a speciation |
| | | perspective. Examples B. anthracis (anthrax), B. cereus |
| | | (food poisoning) |
| Frimicutes | Listeria | 15 identified species. Example: L. monocytogenes food |
| | | poisining. Less frequently seen disease manifestation = |
| | | listeriosis (sepsis and meningitis with a 20% fatality rate) |
| Frimicutes | Staphylococcus | Multiple species and sub. Example: S. aureus. Disease |
| | | can range form folliculitis to necrotizing pneumonia and |
| | | endocarditis. Commonly drug resistant (MRSA) |
| Frimicutes | Enterococcus | Multiple species. Cause UTI, Bacteremia, endocarditis, |
| | | diverticulitis, meningitis, prostatitis. Example: E. faecium. |
| | | Increasingly drug resistant (VRE) |
| Frimicutes | Lactobacillus | Often considered beneficial, but can cause septicemiva, |
| | | endocarditis, rheumatic vascular disease and dental |
| | | caries (particularly in immuno-compromised patients). |
| | | Example L. rhamnosus |
| Frimicutes | Streptococcus | Multiple species. Cause strep throat, pink eye, meningitis, |
| | | bacterial pneumonia, sepsis, endocarditis, erysipelas, |
| | | necrotizing fasciitis. Examples: S. pyogenes, S. pneumoniae, |
| | | S. sanguinis |
| Actinobacteria | Nocardia | Multiple species. Low virulence and generally infect the |
| | | immunocompromised only. Cause penumonia, |
| | | endocarditis, encephalitis, cellulitis. Example N. asteroids |
| Actinobacteria | Mycobacterium | Multiple species. Cause tuberculosis, leprosy. Examples |
| | | M. tuberculosis, M. leprae |
| Actinobacteria | Corynebacterium | Multiple species. Cause diptheria, colonizes prosthetics, |
| | | and can cause skin infections, endocarditis, pheumonitis. |
| | | Nosocomial |
| Actinobacteria | Actinomyces | Multiple species. Cause periodontal abscesses, |
| | | lympadenopathy, thoracic disease and abdominal abscess. |
| | | Example: Aggregatibacter actinomycetemcomitans |
| Chlamydia | Chlamydia | 4 species. Most common bacterial STD and can cause |
| | | blindness. Example Chlamydia trachomatis. |
| Spirochetes | Borrelia | 52 species. Cause Lyme disease and relapsing fever |
| | | (severe bacterimia). Example: Borrelia burgdorferi |
| Spirochetes | Leptospira | Multiple species (13 cause disease in humans). Cause |
| | | leptospirosis - symtpoms range from hedaches and fatigue |
| | | to meningitis, kidney failure and pulmonary hemorrhage. |
| Spirochetes | Treponema | Multiple species. Cuases syphilis Example: Treponema |
| | | pallidum. |
| Bacteroids | Bacteroides | Multiple species. Colonize the gut and cause infections |
| | | associated with surgery, appendicitis etc. Example: B. fragilis |

[0871] In certain embodiments, the infectious disease therapeutic is selected from a fungal polypeptide. In these embodiments, an aAPC comprises an erythroid cell (e.g., an enucleated erythroid cell) or an enucleated cell, comprising one or more exogenous polypeptides, wherein one of the one or more exogenous polypeptides comprises an antigenic fungal polypeptide, and the aAPC is administered to a subject to treat an infection with the fungus.

[0872] Exemplary fungal pathogens are shown below in Table 23.

TABLE 23
Fungal Pathogens

| Fungal | | |
|---|---|---|
| Group | Pathogen Species | Pathology example |
| Yeast | Candida albicans | Oral thrush, onychomycosis |
| Yeast | Candida glabrata | Vaginitis, esophageal candidisis |
| Yeast | Candida krusei | Invasive candidiasis, neutropenia |
| Yeast | Candida | Catheter and central line infections, biofims, UTI, |
| | parapsilosis | endocarditis, meningitis |
| Yeast | Candida tropicalis | Candidemia, oral thrush |
| Yeast | Rhodotorula | Sepsis, catheter infections, fungemia, meningitis, peritonitis |
| | mucilaginosa | |
| Yeast | Sporothrix | Sporotrichosis (lympocutaneous tissue, skin ulcerations) |
| | schenckii complex | |
| Yeast | Cryptococcus | Cryptococcal meningitis, pulmonary infection, osteomyelitis |
| | neoformans | |
| Yeast | Cryptococcus | Cryptococcal meningitis, pulmonary infection, osteomyelitis |
| | gattii | (more common in immunocompromised patients thant C. neoformans, |
| | | which is more prevelant in immunocompetent |
| | | patients) |
| Moulds | Alternaria | Allergic fungal rhinosinusitis, Keratitis, peritonitis, allergic |
| | alternata | respiratory disease |
| Moulds | Apophysomyces | Cutaneous and subcutaneous infection |
| | variabilis | |
| Moulds | Aspergillus | Chronic pulmonary aspergillosis, Asthma exacerbation with |
| | fumigatus | fingal sensitization, chronic invasive sinusitis, invasive and |
| | | disseminated aspergillosis |
| Moulds | Aspergillus flavus | Chronic cavity pulmonary aspergillosis, Cutaneous and |
| | | wound infection, endocarditis, pericarditis and CNS |
| | | infection, UTI |
| Moulds | Aspergillus niger | Otomycosis, SAFS, Allergic bronchopulmonary |
| | | aspergillosis, invasive pulmonary aspergillosis, disseminated |
| | | aspergillosis |
| Moulds | Aspergillus terreus | ABPA, aspergillus bronchitis, invasive aspergillosis, |
| | | disseminated aspergillosis |
| Moulds | Cladosphialophora | Chromoblastomycosis, mycetoma, phaehyphomycosis |
| | spp. | |
| Moulds | Exserohilum | Skin, corneal infection, invasive infection of sinus heart and |
| | | lung |
| Moulds | Fonsecaea | Chromoblastomycosis |
| | pedrosoi | |
| Moulds | Fusarium | Keratitis, Onychomycosis, endophthalmitis, skin infection, |
| | oxysporum | sinusitis, disseminated infection |
| Moulds | Fusarium solani | Keratitis, Onychomycosis, endophthalmitis, skin infection, |
| | | sinusitis, disseminated infection |
| Moulds | Lichtheimia | cutaneous, pulmonary, rhinocerebral CNS and disseminated |
| | corymbifera | infection (rare) |
| Moulds | Lichtheimia | cutaneous, pulmonary, rhinocerebral CNS and disseminated |
| | ramosa | infection (rare) |
| Moulds | Rhizopus | Mucormycosis |
| | microsporus | |
| Moulds | Stachybotrys | idiopathic pulmonary hemorrhage (infants) |
| Moulds | Trichophyton | Tiñea pedis, corporis, cruris, onychomycosis and |
| | interdigitale | occasionally Tinea capitis |
| Moulds | Trichophyton | Tinea of the groin, glabrous skin, feet, hands, and the nails. |
| | rubrum | Tinea cruris, tinea corporis, tinea pedis, tinea manuum, and |
| | | onychomycosis |
| Dimorphic | Histoplasma | Pneumonia, multi-organ failure |
| Fungi | capsulatum | |
| Dimorphic | Pneumocystis | Pneumonia (mostly in immune supressed patients) |
| Fungi | jirovecii | |
| Dimorphic | Paracoccidioides | Disseminated systemic infection |
| Fungi | brasiliensis | |
| Dimorphic | Penicillium | Disseminated infection with prominent skin lesions |
| Fungi | marneffei | (immunocompromised patients) |
| Dimorphic | Blastomyces | Skin infections, rearely disseminated |
| Fungi | | |
| Dimorphic | Coccidioides | Meningitis, disseminated disease, lung nodule, chronic |
| Fungi | | cavitary pulmonary coccidioidmycosis |

[0873] In certain embodiments, the infectious disease therapeutic is selected from a parasitic polypeptide. In these embodiments, an aAPC comprises an erythroid cell (e.g., an enucleated erythroid cell) or an enucleated cell, comprising one or more exogenous polypeptides, wherein one of the one or more exogenous polypeptides comprises an antigenic parasitic polypeptide, and the aAPC is administered to a subject to treat an infection with the parasite.

[0874] Exemplary parasitic pathogens are shown below in Table 24.

TABLE 24
Parasitic Pathogens

| Parasitic | | |
|---|---|---|
| Group | Pathogen Species | Disease/Pathology Example |
| Amoeba/ | Acanthamoeba | Acanthamoeba Infection |
| Protozoa | | |
| Amoeba/ | Acanthamoeba | Acanthamoeba Keratitis Infection |
| Protozoa | | |
| Amoeba/ | Trypanosoma brucei | African Sleeping Sickness (African trypanosomiasis) |
| Protozoa | | |
| Amoeba/ | Entamoeba histolytica | Amebiasis (Entamoeba histolytica Infection) |
| Protozoa | | |
| Amoeba/ | Trypanosoma cruzi | American Trypanosomiasis (Chagas Disease) |
| Protozoa | | |
| Amoeba/ | Balantidium coli | Balantidiasis (Balantidium Infection) |
| Protozoa | | |
| Amoeba/ | Balamuthia | Balamuthia (Granulomatous Amebic Encephalitis |
| Protozoa | mandrillaris | (GAE)) |
| Amoeba/ | Cryptosporidium | Cryptosporidiosis (Cryptosporidium Infection) |
| Protozoa | | |
| Amoeba/ | Cyclospora | Cyclosporiasis (Cyclospora Infection) |
| Protozoa | | |
| Amoeba/ | Taenia solium | Cysticercosis (Neurocysticercosis) |
| Protozoa | | |
| Amoeba/ | Cystoisospora belli | Cystoisospora Infection (Cystoisosporiasis) formerly |
| Protozoa | | Isospora Infection |
| Amoeba/ | | |
| Protozoa | Dientamoeba fragilis | Dientamoeba fragilis Infection |
| Amoeba/ | Entamoeba histolytica | Entamoeba histolytica Infection (Amebiasis) |
| Protozoa | | |
| Amoeba/ | Giardia | Giardiasis (Giardia Infection) |
| Protozoa | intestinalis, Giardia | |
| | lamblia, or Giardia | |
| | duodenalis | |
| Amoeba/ | Leishmania | Kala-azar (Leishmaniasis, Leishmania Infection) |
| Protozoa | | |
| Amoeba/ | Acanthamoeba | Keratitis (Acanthamoeba Infection) |
| Protozoa | | |
| Amoeba/ | Multiple species. | Malaria (Plasmodium Infection) |
| Protozoa | Examples: P. vivax and | |
| | P. ovale | |
| Amoeba/ | Naegleria fowleri | Naegleria Infection |
| Protozoa | “brain-eating amoeba” | |
| Amoeba/ | Sappinia ameoba | Sappinia (amebic encephalitis) |
| Protozoa | | |
| Amoeba/ | Sarcocystis | Sarcocystosis (Sarcocystosis Infection) |
| Protozoa | | |
| Amoeba/ | Toxoplasma gondii | Toxoplasmosis (Toxoplasma Infection) - protazoa |
| Protozoa | | |
| Amoeba/ | Trichomonas vaginalis | Trichomoniasis (Trichomonas Infection) - protozoa |
| Protozoa | | |
| Amoeba/ | Trypanosoma brucei | Trypanosomiasis, African (African Sleeping Sickness, |
| Protozoa | | Sleeping Sickness) - protozoa |
| Amoeba/ | Babesia (various | Babesiosis (Babesia Infection) - similar lifecycle to |
| Protozoa | species) | malaria, taken up by RBCs |
| Arthropod | Cimex | Bed Bugs |
| | lectularius and C. hemipterus | |
| Arthropod | Pediculus humanus | Body Lice Infestation (Pediculosis) |
| | humanus | |
| Arthropod | Phthirus pubis | Crabs (Pubic Lice) |
| Arthropod | Pediculus humanus | Head Lice Infestation (Pediculosis) |
| | capitis | |
| Arthropod | Sarcoptes | Mite Infestation (Scabies) |
| | scabiei var. hominis | |
| Arthropod | infection of a fly larva. | Myiasis |
| | Examples: Dermatobia | |
| | hominis | |
| Other | group of obligate | Microsporidiosis (Microsporidia Infection) |
| | intracellular parasitic | |
| | fungi. Examples: M. africanum, | |
| | Nosema | |
| | ocularum | |
| Other | Pneumocystis jirovecii | Pneumocystis jirovecii Pneumonia |
| | (considered a parasitic | |
| | fungi) | |
| Protist | Blastocystis hominis | Blastocystis hominis Infection |
| Worm | Echinococcus | Alveolar Echinococcosis (Echinococcosis, Hydatid |
| | granulosus | Disease) |
| Worm | Hookworm (various | Ancylostomiasis (Hookworm) |
| | species) | |
| Worm | Angiostrongylus | Angio strongyliasis (Angiostrongylus Infection) |
| | (various species) | |
| | nematode | |
| Worm | anisakid nematodes | Anisakiasis (Anisakis Infection, Pseudoterranova |
| | | Infection) |
| Worm | Ascaris lumbricoides | Ascariasis (Ascaris Infection, Intestinal Roundworms) |
| Worm | B. procyonis | Baylisascariasis (Baylisascaris Infection, Raccoon |
| | | Roundworm) |
| Worm | S. mansoni | Bilharzia (Schistosomiasis) |
| Worm | Capillaria | Capillariasis (Capillaria Infection) |
| | hepatica and Capillaria | |
| | philippinensis | |
| Worm | Various species, | Cercarial Dermatitis (Swimmer's Itch) |
| | example: | |
| | Austrobilharzia | |
| | variglandis | |
| Worm | Clonorchis liver fluke | Clonorchiasis (Clonorchis Infection) |
| Worm | Diphyllobothrium | Diphyllobothriasis (Diphyllobothrium Infection) |
| | latum (tapeworm) | |
| Worm | Dipylidiu tapeworm | Dipylidium caninum Infection (dog or cat tapeworm |
| | | infection) |
| Worm | Dirofilaria roundworms | Dirofilariasis (Dirofilaria Infection) |
| Worm | Guinea worm | Dracunculiasis (Guinea Worm Disease) |
| Worm | Echinococcus | Echinococcosis (Cystic, Alveolar Hydatid Disease) |
| | granulosus & | |
| | Echinococcus | |
| | multilocularis | |
| Worm | Wuchereria | Elephantiasis (Filariasis, Lymphatic Filariasis) |
| | bancrofti, Brugia malayi | |
| | and Brugia timori | |
| Worm | Enterobius | Enterobiasis (Pinworm Infection) |
| | vermicularis | |
| Worm | Fasciola hepatica | Fascioliasis (Fasciola (liver fluke) Infection) |
| Worm | Fasciolopsis buski | Fasciolopsiasis (Fasciolopsis Infection) |
| Worm | Gnathostoma: several | Gnathostomiasis (Gnathostoma Infection) |
| | species of parasitic | |
| | nematodes | |
| Worm | trematode Heterophyes | Heterophyiasis (Heterophyes Infection) |
| | heterophyes | |
| Worm | Multiple species. | Hookworm Infection, Human |
| | Example: L: Filariform | |
| Worm | Multiple species. | Hookworm Infection, Zoonotic (Ancylostomiasis, |
| | Example: Ancylostoma | Cutaneous Larva Migrans [CLM]) |
| | brazilense, A. caninum, | |
| | A. ceylanicum | |
| Worm | H. nana (dwarf | Hymenolepiasis (Hymenolepis Infection) |
| | tapeworm) | |
| Worm | Various species, | Intestinal Roundworms (Ascariasis, Ascaris Infection) |
| | example: A. lumbricoides | |
| Worm | Loa boa: parasitic | Loiasis (Loa boa Infection) |
| | worm | |
| Worm | Taenia solium | Neurocysticercosis (Cysticercosis) |
| Worm | Toxocara canis and | Ocular Larva Migrans (Toxocariasis, Toxocara Infection, |
| | Toxocara cati | Visceral Larva Migrans) |
| Worm | Onchocerca volvulus | Onchocerciasis (River Blindness) |
| Worm | Opisthorchis (liver | Opisthorchiasis (Opisthorchis Infection) |
| | fluke). Example: O. felineus | |
| Worm | Paragonimus (lung | Paragonimiasis (Paragonimus Infection) |
| | fluke) | |
| Worm | anisakid nematodes | Pseudoterranova Infection (Anisakiasis, Anisakis |
| | | Infection) |
| Worm | Strongyloides | Strongyloidiasis (Strongyloides Infection) |
| | nematodes. Example: | |
| | S. stercoralis | |
| Worm | Taenia saginata | Taeniasis (Taenia Infection, Tapeworm Infection) |
| Worm | Trichinella | Trichinellosis (Trichinosis) |
| Worm | T. trichiura | Trichuriasis (Whipworm Infection, Trichuris Infection) |

[0875] In some embodiments, the infectious diseases is multi-drug resistant staph. In another embodiments, the infectious diseases is pseudomonas. In another embodiment, the infectious disease is a nosocomial infections (i.e. any systemic or localized conditions that result from the reaction by an infectious agent or toxin) that are difficult to treat, for example infections caused by Clostridium difficile.

[0876] Other

[0877] Other diseases and disorders are contemplated for treatment by the aAPCs of the present disclosure. Examples include, but are not limited to cardiovascular diseases and immune diseases.

### Subjects

[0878] The methods described herein are intended for use with any subject that may experience the benefits of these methods. Thus, “subjects,” “patients,” and “individuals” (used interchangeably) include humans as well as non-human subjects, particularly domesticated animals.

[0879] In some embodiments, the subject and/or animal is a mammal, e g., a human, mouse, rat, guinea pig, dog, cat, horse, cow, pig, rabbit, sheep, or non-human primate, such as a monkey, chimpanzee, or baboon. In other embodiments, the subject and/or animal is a non-mammal. In some embodiments, the subject and/or animal is a human. In some embodiments, the human is a pediatric human In other embodiments, the human is an adult human. In other embodiments, the human is a geriatric human. In other embodiments, the human may be referred to as a patient.

[0880] In certain embodiments, the human has an age in a range of from about 0 months to about 6 months old, from about 6 to about 12 months old, from about 6 to about 18 months old, from about 18 to about 36 months old, from about 1 to about 5 years old, from about 5 to about 10 years old, from about 10 to about 15 years old, from about 15 to about 20 years old, from about 20 to about 25 years old, from about 25 to about 30 years old, from about 30 to about 35 years old, from about 35 to about 40 years old, from about 40 to about 45 years old, from about 45 to about 50 years old, from about 50 to about 55 years old, from about 55 to about 60 years old, from about 60 to about 65 years old, from about 65 to about 70 years old, from about 70 to about 75 years old, from about 75 to about 80 years old, from about 80 to about 85 years old, from about 85 to about 90 years old, from about 90 to about 95 years old or from about 95 to about 100 years old.

[0881] In other embodiments, the subject is a non-human animal, and therefore the disclosure pertains to veterinary use. In a specific embodiment, the non-human animal is a household pet. In another specific embodiment, the non-human animal is a livestock animal In certain embodiments, the subject is a human cancer patient that cannot receive chemotherapy, e.g. the patient is unresponsive to chemotherapy or too ill to have a suitable therapeutic window for chemotherapy (e.g. experiencing too many dose- or regimen-limiting side effects). In certain embodiments, the subject is a human cancer patient having advanced and/or metastatic disease.

[0882] In some embodiments, the subject is selected for treatment with an aAPC comprising an erythroid cell presenting (e.g. comprising on the cell surface) one or more exogenous polypeptides of the present disclosure. In some embodiments, the subject is selected for treatment of cancer with an aAPC comprising an erythroid cell presenting (e.g. comprising on the cell surface) one or more exogenous polypeptides of the present disclosure. In some embodiments, the subject is selected for treatment of an autoimmune disease with an aAPC comprising an erythroid cell presenting (e.g. comprising on the cell surface) one or more exogenous polypeptides of the present disclosure. In some embodiments, the subject is selected for treatment of an infectious disease with an aAPC comprising an erythroid cell presenting (e.g. comprising on the cell surface) one or more exogenous polypeptides of the present disclosure.

[0883] In some embodiments of the above aspects and embodiments, the erythroid cell is an enucleated erythroid cell. In some embodiments of the above aspects and embodiments, the erythroid cell is a nucleated erythroid cell.

### V. Pharmaceutical Compositions

[0884] The present disclosure encompasses the preparation and use of pharmaceutical compositions comprising an aAPC of the disclosure as an active ingredient. Such a pharmaceutical composition may consist of the active ingredient alone, as a combination of at least one active ingredient (e.g., an effective dose of an aAPC) in a form suitable for administration to a subject, or the pharmaceutical composition may comprise the active ingredient and one or more pharmaceutically acceptable carriers, one or more additional (active and/or inactive) ingredients, or some combination of these.

[0885] In some embodiments, the disclosure features a pharmaceutical composition comprising a plurality of the aAPCs described herein, and a pharmaceutical carrier. In other embodiments, the disclosure features a pharmaceutical composition comprising a population of aAPCs as described herein, and a pharmaceutical carrier. It will be understood that any single aAPCs, plurality of aAPCs, or population of aAPCs as described elsewhere herein may be present in a pharmaceutical composition of the invention.

[0886] In some embodiments, the pharmaceutical compositions provided herein comprise engineered (i.e. modified) erythroid cells and unmodified erythroid cells. For example, a single unit dose of aAPCs can comprise, in various embodiments, about, at least, or no more than 10%, 20%, 30%, 40%, 50%, 60%, 70%, 75%, 80%), 85%, 90%, 95%, or 99% engineered erythroid cells, wherein the remaining erythroid cells in the composition are not engineered.

[0887] In some embodiments, the pharmaceutical compositions provided herein comprise aAPCs comprising engineered enucleated erythroid cells and nucleated erythroid cells. For example, a single unit dose of engineered erythroid cells (e.g., enucleated and nucleated erythroid cells) can comprise, in various embodiments, about, or at least 10%, 20%, 30%, 40%, 50%, 60%, 70%, 75%, 80%, 85%, 90%, 91%, 92%, 93%, 94%, 95%, 96%, 97%, 98%, or 99% enucleated erythroid cells, wherein the remaining erythroid cells in the composition are nucleated.

[0888] Pharmaceutical compositions of the present disclosure may be administered in a manner appropriate to the disease to be treated (or prevented). The quantity and frequency of administration will be determined by such factors as the condition of the patient, and the type and severity of the patient's disease, although appropriate dosages may be determined by clinical trials.

[0889] The administration of the pharmaceutical compositions may be carried out in any convenient manner, including by aerosol inhalation, injection, ingestion, transfusion, implantation or transplantation. The compositions of the present disclosure may be administered to a patient subcutaneously, intradermally, intramuscularly, by intravenous (i.v.) injection, or intraperitoneally. The pharmaceutical compositions may be injected directly into a tumor or lymph node.

[0890] As used herein, the term “pharmaceutically acceptable carrier” means a chemical composition with which the active ingredient may be combined and which, following the combination, can be used to administer the active ingredient to a subject.

[0891] The formulations of the pharmaceutical compositions described herein may be prepared by any method known or hereafter developed in the art of pharmacology. In general, such preparatory methods include the step of bringing the active ingredient into association with a carrier or one or more other accessory ingredients, and then, if necessary or desirable, shaping or packaging the product into a desired single- or multi-dose unit.

[0892] Although the descriptions of pharmaceutical compositions provided herein are principally directed to pharmaceutical compositions which are suitable for ethical administration to humans, it will be understood by the skilled artisan that such compositions are generally suitable for administration to animals of all sorts. Modification of pharmaceutical compositions suitable for administration to humans in order to render the compositions suitable for administration to various animals is well understood, and the ordinarily skilled veterinary pharmacologist can design and perform such modification with merely ordinary, if any, experimentation. Subjects to which administration of the pharmaceutical compositions of the disclosure is contemplated include, but are not limited to, humans and other primates, mammals including commercially relevant mammals such as non-human primates, cattle, pigs, horses, sheep, cats, and dogs, birds including commercially relevant birds such as chickens, ducks, geese, and turkeys, fish including farm-raised fish and aquarium fish, and crustaceans such as farm-raised shellfish.

[0893] Pharmaceutical compositions that are useful in the methods of the disclosure may be prepared, packaged, or sold in formulations suitable for oral, rectal, vaginal, parenteral, topical, pulmonary, intranasal, intra-lesional, buccal, ophthalmic, intravenous, intra-organ or another route of administration. Other contemplated formulations include projected nanoparticles, liposomal preparations, resealed erythrocytes containing the active ingredient, and immunologically-based formulations.

[0894] A pharmaceutical composition of the disclosure may be prepared, packaged, or sold in bulk, as a single unit dose, or as a plurality of single unit doses. As used herein, a “unit dose” is discrete amount of the pharmaceutical composition comprising a predetermined amount of the active ingredient. The amount of the active ingredient is generally equal to the dosage of the active ingredient which would be administered to a subject or a convenient fraction of such a dosage such as, for example, one-half or one-third of such a dosage.

[0895] The relative amounts of the active ingredient, the pharmaceutically acceptable carrier, and any additional ingredients in a pharmaceutical composition of the disclosure will vary, depending upon the identity, size, and condition of the subject treated and further depending upon the route by which the composition is to be administered. By way of example, the composition may comprise between 0.1% and 100% (w/w) active ingredient.

[0896] In addition to the active ingredient, a pharmaceutical composition of the disclosure may further comprise one or more additional pharmaceutically active agents. Particularly contemplated additional agents include anti-emetics and scavengers such as cyanide and cyanate scavengers and AZT, protease inhibitors, reverse transcriptase inhibitors, interleukin-2, interferons, cytokines, and the like.

[0897] Controlled- or sustained-release formulations of a pharmaceutical composition of the disclosure may be made using conventional technology.

[0898] As used herein, “parenteral administration” of a pharmaceutical composition includes any route of administration characterized by physical breaching of a tissue of a subject and administration of the pharmaceutical composition through the breach in the tissue. Parenteral administration thus includes, but is not limited to, administration of a pharmaceutical composition by injection of the composition, by application of the composition through a surgical incision, by application of the composition through a tissue-penetrating non-surgical wound, and the like. In particular, parenteral administration is contemplated to include, but is not limited to, subcutaneous, intraperitoneal, intramuscular, intrasternal injection, and kidney dialytic infusion techniques.

[0899] Formulations of a pharmaceutical composition suitable for parenteral administration comprise the active ingredient combined with a pharmaceutically acceptable carrier, such as sterile water or sterile isotonic saline. Such formulations may be prepared, packaged, or sold in a form suitable for bolus administration or for continuous administration. Injectable formulations may be prepared, packaged, or sold in unit dosage form, such as in ampules or in multi-dose containers containing a preservative. Formulations for parenteral administration include, but are not limited to, suspensions, solutions, emulsions in oily or aqueous vehicles, pastes, and implantable sustained-release or biodegradable formulations. Such formulations may further comprise one or more additional ingredients including, but not limited to, suspending, stabilizing, or dispersing agents.

[0900] The pharmaceutical compositions may be prepared, packaged, or sold in the form of a sterile injectable aqueous or oily suspension or solution. This suspension or solution may be formulated according to the known art, and may comprise, in addition to the active ingredient, additional ingredients such as the dispersing agents, wetting agents, or suspending agents described herein. Such sterile injectable formulations may be prepared using a non-toxic parenterally-acceptable diluent or solvent, such as water or 1,3-butane diol, for example. Other acceptable diluents and solvents include, but are not limited to, Ringer's solution, isotonic sodium chloride solution, and fixed oils such as synthetic mono- or di-glycerides. Other parentally-administrable formulations which are useful include those which comprise the active ingredient in microcrystalline form, in a liposomal preparation, or as a component of a biodegradable polymer systems. Compositions for sustained release or implantation may comprise pharmaceutically acceptable polymeric or hydrophobic materials such as an emulsion, an ion exchange resin, a sparingly soluble polymer, or a sparingly soluble salt.

[0901] The aAPC of the disclosure and/or T cells expanded using the aAPC, can be administered to an animal, preferably a human. When the T cells expanded using an aAPC of the disclosure are administered, the amount of cells administered can range from about 1 million cells to about 300 billion. Where the aAPCs themselves are administered, either with or without T cells expanded thereby, they can be administered in an amount ranging from about 100,000 to about one billion cells wherein the cells are infused into the animal, preferably, a human patient in need thereof. While the precise dosage administered will vary depending upon any number of factors, including but not limited to, the type of animal and type of disease state being treated, the age of the animal and the route of administration.

[0902] The aAPC may be administered to an animal as frequently as several times daily, or it may be administered less frequently, such as once a day, once a week, once every two weeks, once a month, or even less frequently, such as once every several months or even once a year or less. The frequency of the dose will be readily apparent to the skilled artisan and will depend upon any number of factors, such as, but not limited to, the type and severity of the disease being treated, the type and age of the animal, etc.

[0903] An aAPC (or cells expanded thereby) may be co-administered with the various other compounds (cytokines, chemotherapeutic and/or antiviral drugs, among many others). Alternatively, the compound(s) may be administered an hour, a day, a week, a month, or even more, in advance of the aAPC (or cells expanded thereby), or any permutation thereof. Further, the compound(s) may be administered an hour, a day, a week, or even more, after administration of aAPC (or cells expanded thereby), or any permutation thereof. The frequency and administration regimen will be readily apparent to the skilled artisan and will depend upon any number of factors such as, but not limited to, the type and severity of the disease being treated, the age and health status of the animal, the identity of the compound or compounds being administered, the route of administration of the various compounds and the aAPC (or cells expanded thereby), and the like.

[0904] Further, it would be appreciated by one skilled in the art, based upon the disclosure provided herein, that where the aAPC is to be administered to a mammal, the cells are treated so that they are in a “state of no growth”; that is, the cells are incapable of dividing when administered to a mammal. As disclosed elsewhere herein, the cells can be irradiated to render them incapable of growth or division once administered into a mammal. Other methods, including haptenization (e.g., using dinitrophenyl and other compounds), are known in the art for rendering cells to be administered, especially to a human, incapable of growth, and these methods are not discussed further herein. Moreover, the safety of administration of aAPC that have been rendered incapable of dividing in vivo has been established in Phase I clinical trials using aAPC transfected with plasmid vectors encoding some of the molecules discussed herein.

### Combination Therapies

[0905] In some embodiments, the disclosure provides methods that further comprise administering an additional agent to a subject. In some embodiments, the disclosure pertains to co-administration and/or co-formulation.

[0906] In some embodiments, administration of the aAPC acts synergistically when co-administered with another agent and is administered at doses that are lower than the doses commonly employed when such agents are used as monotherapy.

[0907] In some embodiments, inclusive of, without limitation, cancer applications, the present disclosure pertains to chemotherapeutic agents as additional agents. Examples of chemotherapeutic agents include, but are not limited to, alkylating agents such as thiotepa and CYTOXAN cyclosphosphamide; alkyl sulfonates such as busulfan, improsulfan and piposulfan; aziridines such as benzodopa, carboquone, meturedopa, and uredopa; ethylenimines and methylamelamines including altretamine, triethylenemelamine, trietylenephosphoramide, triethiylenethiophosphoramide and trimethylolomelamine; acetogenins (e.g., bullatacin and bullatacinone); a camptothecin (including the synthetic analogue topotecan); bryostatin; cally statin; CC-1065 (including its adozelesin, carzelesin and bizelesin synthetic analogues); cryptophycins (e.g., cryptophycin 1 and cryptophycin 8); dolastatin; duocarmycin (including the synthetic analogues, KW-2189 and CB 1-TM1); eleutherobin; pancratistatin; a sarcodictyin; spongistatin; nitrogen mustards such as chlorambucil, chlornaphazine, cholophosphamide, estramustine, ifosfamide, mechlorethamine, mechlorethamine oxide hydrochloride, melphalan, novembichin, phenesterine, prednimustine, trofosfamide, uracil mustard; nitrosureas such as carmustine, chlorozotocin, fotemustine, lomustine, nimustine, and ranimnustine; antibiotics such as the enediyne antibiotics (e.g., calicheamicin, especially calicheamicin gammall and calicheamicin omegall; dynemicin, including dynemicin A; bisphosphonates, such as clodronate; an esperamicin; as well as neocarzinostatin chromophore and related chromoprotein enediyne antibiotic chromophores), aclacinomy sins, actinomycin, authramycin, azaserine, bleomycins, cactinomycin, carabicin, caminomycin, carzinophilin, chromomycinis, dactinomycin, daunorubicin, detorubicin, 6-diazo-5-oxo-L-norleucine, ADRIAMYCIN doxorubicin (including morpholino-doxorubicin, cyanomorpholino-doxorubicin, 2-pyrrolino-doxorubicin and deoxy doxorubicin), epirubicin, esorubicin, idarubicin, marcellomycin, mitomycins such as mitomycin C, mycophenolic acid, nogalamycin, olivomycins, peplomycin, potfiromycin, puromycin, quelamycin, rodorubicin, streptonigrin, streptozocin, tubercidin, ubenimex, zinostatin, zorubicin; anti-metabolites such as methotrexate and 5-fluorouracil (5-FU); folic acid analogues such as denopterin, methotrexate, pteropterin, trimetrexate; purine analogs such as fludarabine, 6-mercaptopurine, thiamiprine, thioguanine; pyrimidine analogs such as ancitabine, azacitidine, 6-azauridine, carmofur, cytarabine, dideoxyuridine, doxifluridine, enocitabine, floxuridine; androgens such as calusterone, dromostanolone propionate, epitiostanol, mepitiostane, testolactone; anti-adrenals such as minoglutethimide, mitotane, trilostane; folic acid replenisher such as frolinic acid; aceglatone; aldophosphamide glycoside; aminolevulinic acid; eniluracil; amsacrine; bestrabucil; bisantrene; edatraxate; demecolcine; diaziquone; elformithine; elliptinium acetate; an epothilone; etoglucid; gallium nitrate; hydroxyurea; lentinan; lonidainine; maytansinoids such as maytansine and ansamitocins; mitoguazone; mitoxantrone; mopidanmol; nitraerine; pentostatin; phenamet; pirarubicin; losoxantrone; podophyllinic acid; 2-ethylhydrazide; procarbazine; PSK polysaccharide complex; razoxane; rhizoxin; sizofuran; spirogermanium; tenuazonic acid; triaziquone; 2,2′,2″-trichlorotriethylamine; trichothecenes (e.g., T-2 toxin, verracurin A, roridin A and anguidine); urethan; vindesine; dacarbazine; mannomustine; mitobronitol; mitolactol; pipobroman; gacytosine; arabinoside (“Ara-C”); cyclophosphamide; thiotepa; taxoids, e.g., TAXOL paclitaxel (Bristol-Myers Squibb Oncology, Princeton, N.J.), ABRAXANE Cremophor-free, albumin-engineered nanoparticle formulation of paclitaxel, and TAXOTERE doxetaxel; chloranbucil; GEMZAR gemcitabine; 6-thioguanine; mercaptopurine; methotrexate; platinum analogs such as cisplatin, oxaliplatin and carboplatin; vinblastine; platinum; etoposide (VP-16); ifosfamide; mitoxantrone; vincristine; NAVELBINE. vinorelbine; novantrone; teniposide; edatrexate; daunomycin; aminopterin; xeloda; ibandronate; irinotecan (Camptosar, CPT-11) (including the treatment regimen of irinotecan with 5-FU and leucovorin); topoisomerase inhibitor RFS 2000; difluoromethylornithine (DMFO); retinoids such as retinoic acid; capecitabine; combretastatin; leucovorin (LV); oxaliplatin, including the oxaliplatin treatment regimen (FOLFOX); lapatinib (TYKERB); inhibitors of PKC-α., Raf, H-Ras, EGFR (e.g., erlotinib (Tarceva)) and VEGF-A that reduce cell proliferation and pharmaceutically acceptable salts, acids or derivatives of any of the above. In addition, the methods of treatment can further include the use of radiation.

[0908] Some human tumors can be eliminated by a patient's immune system. For example, administration of a monoclonal antibody targeted to an immune “checkpoint” molecule can lead to complete response and tumor remission. A mode of action of such antibodies is through inhibition of an immune regulatory molecule that the tumors have co-opted as protection from an anti-tumor immune response. By inhibiting these “checkpoint” molecules (e.g., with an antagonistic antibody), a patient's CD8+ T cells may be allowed to proliferate and destroy tumor cells.

[0909] For example, administration of a monoclonal antibody targeted to by way of example, without limitation, CTLA-4 or PD-1 can lead to complete response and tumor remission. The mode of action of such antibodies is through inhibition of CTLA-4 or PD-1 that the tumors have co-opted as protection from an anti-tumor immune response. By inhibiting these “checkpoint” molecules (e.g., with an antagonistic antibody), a patient's CD8+ T cells may be allowed to proliferate and destroy tumor cells.

[0910] Thus, the aAPCs comprising an enucleated cell or erythroid cell presenting (e.g. comprising on the cell surface) one or more exogenous polypeptides provided herein can be used in combination with one or more blocking antibodies targeted to an immune “checkpoint” molecule. For instance, in some embodiments, the compositions provided herein can be used in combination with one or more blocking antibodies targeted to a molecule such as CTLA-4 or PD-1. For example, the compositions provided herein may be used in combination with an agent that blocks, reduces and/or inhibits PD-1 and PD-L1 or PD-L2 and/or the binding of PD-1 with PD-L1 or PD-L2 (by way of non-limiting example, one or more of nivolumab (ONO-4538/BMS-936558, MDX1106, OPDIVO, BRISTOL MYERS SQUIBB), pembrolizumab (KEYTRUDA, Merck), pidilizumab (CT-011, CURE TECH), MK-3475 (MERCK), BMS 936559 (BRISTOL MYERS SQUIBB), MPDL328OA (ROCHE)). In an embodiment, the compositions provided herein may be used in combination with an agent that blocks, reduces and/or inhibits the activity of CTLA-4 and/or the binding of CTLA-4 with one or more receptors (e.g. CD80, CD86, AP2M1, SHP-2, and PPP2R5A). For instance, in some embodiments, the immune-modulating agent is an antibody such as, by way of non-limitation, ipilimumab (MDX-010, MDX-101, Yervoy, BMS) and/or tremelimumab (Pfizer). Blocking antibodies against these molecules can be obtained from, for example, Bristol Myers Squibb (New York, N.Y.), Merck (Kenilworth, N.J.), MedImmune (Gaithersburg, Md.), and Pfizer (New York, N.Y.).

[0911] Further, the aAPC compositions provided herein can be used in combination with one or more blocking antibodies targeted to an immune “checkpoint” molecule such as for example, BTLA, HVEM, TIM3, GALS, LAG3, VISTA, KIR, 2B4, CD160 (also referred to as BY55), CGEN-15049, CHK 1 and CHK2 kinases, A2aR, CEACAM (e.g., CEACAM-1, CEACAM-3 and/or CEACAM-5), GITR, GITRL, galectin-9, CD244, CD160, TIGIT, SIRPα, ICOS, CD172a, and TMIGD2 and various B-7 family ligands (including, but are not limited to, B7-1, B7-2, B7-DC, B7-H1, B7-H2, B7-H3, B7-H4, B7-H5, B7-H6 and B7-H7).

[0912] In some embodiments of the above aspects and embodiments, the erythroid cell is an enucleated erythroid cell. In some embodiments of the above aspects and embodiments, the erythroid cell is a nucleated erythroid cell.

[0913] In some embodiments, the disclosure features a pharmaceutical composition comprising a plurality of the engineered erythroid cells described herein, and a pharmaceutical carrier. In other embodiments, the disclosure features a pharmaceutical composition comprising a population of engineered erythroid cells as described herein, and a pharmaceutical carrier. It will be understood that any single engineered erythroid cell, plurality of engineered erythroid cells, or population of engineered erythroid cells as described elsewhere herein may be present in a pharmaceutical composition of the invention.

[0914] In some embodiments, the pharmaceutical compositions provided herein comprise engineered (i.e. modified) erythroid cells and unmodified erythroid cells. For example, a single unit dose of erythroid cells (e.g., modified and unmodified erythroid cells) can comprise, in various embodiments, about, at least, or no more than 10%, 20%, 30%, 40%, 50%, 60%, 70%, 75%, 80%), 85%, 90%, 95%, or 99% engineered erythroid cells, wherein the remaining erythroid cells in the composition are not engineered.

[0915] In some embodiments, the pharmaceutical compositions provided herein comprise engineered enucleated erythroid cells and nucleated erythroid cells. For example, a single unit dose of engineered erythroid cells (e.g., enucleated and nucleated erythroid cells) can comprise, in various embodiments, about, or at least 10%, 20%, 30%, 40%, 50%, 60%, 70%, 75%, 80%, 85%, 90%, 91%, 92%, 93%, 94%, 95%, 96%, 97%, 98%, or 99% enucleated erythroid cells, wherein the remaining erythroid cells in the composition are nucleated.

### VI. Kits

[0916] The disclosure includes various kits which comprise an aAPC of the disclosure, a nucleic acid encoding various proteins, an antibody that specifically binds to a costimulatory molecule on the surface of a T cell, and/or a nucleic acid encoding the antibody of the disclosure, an antigen, or an cytokine, an applicator, and instructional materials which describe use of the kit to perform the methods of the disclosure. Although exemplary kits are described below, the contents of other useful kits will be apparent to the skilled artisan in light of the present disclosure. Each of these kits is included within the disclosure.

[0917] The disclosure includes a kit for specifically inducing proliferation of a T cell expressing a known co-stimulatory molecule. This is because contacting the T cell with an aAPC, specifically induces proliferation of the T cell. The kit is used pursuant to the methods disclosed in the disclosure. Briefly, the kit may be used to administer an aAPC of the disclosure to a T cell expressing at least one costimulatory molecule. This is because, as more fully disclosed elsewhere herein, the data disclosed herein demonstrate that contacting a T cell with an aAPC comprising a costimulatory ligand that specifically binds with the cognate costimulatory molecule present on the T cell, mediates stimulation and activation of the T cell. Further, the T cells produced using this kit can be administered to an animal to achieve therapeutic results.

[0918] The kit further comprises an applicator useful for administering the aAPC to the T cells. The particular applicator included in the kit will depend on, e.g., the method used to administer the aAPC, as well as the T cells expanded by the aAPC, and such applicators are well-known in the art and may include, among other things, a pipette, a syringe, a dropper, and the like. Moreover, the kit comprises an instructional material for the use of the kit. These instructions simply embody the disclosure provided herein.

[0919] The kit includes a pharmaceutically-acceptable carrier. The composition is provided in an appropriate amount as set forth elsewhere herein. Further, the route of administration and the frequency of administration are as previously set forth elsewhere herein.

[0920] The kit encompasses an aAPC comprising a wide plethora of molecules, such as, but not limited to, those set forth herein. However, the skilled artisan armed with the teachings provided herein, would readily appreciate that the disclosure is in no way limited to these, or any other, combination of molecules. Rather, the combinations set forth herein are for illustrative purposes and they in no way limit the combinations encompassed by the present disclosure. Further, the kit comprises a kit where each molecule to be transduced into the aAPC is provided as an isolated nucleic acid encoding a molecule, a vector comprising a nucleic acid encoding a molecule, and any combination thereof, including where at least two molecules are encoded by a contiguous nucleic acid and/or are encoded by the same vector.

[0921] All publications and patent applications cited in this specification are herein incorporated by reference in their entirety for all purposes as if each individual publication or patent application were specifically and individually indicated to be incorporated by reference for all purposes. The publications discussed herein are provided solely for their disclosure prior to the filing date of the present application. Nothing herein is to be construed as an admission that the inventors described herein are not entitled to antedate such disclosure by virtue of prior disclosure or for any other reason.

### EXAMPLES

### Example 1. Generation of Erythroid Cells Genetically Engineered to Express a MOG-MHCII-GPA Fusion Protein

### Results

[0922] Erythroid cells are transduced to express a fusion protein comprising an exogenous antigenic peptide, myelin oligodendrocyte glycoprotein (MOG), fused to an exogenous antigen presenting polypeptide, specifically MHCII, fused to the GPA transmembrane domain (GPA), which serves as a membrane anchor (MOG-MHCII-GPA). FIG. 1A shows a schematic of the design for expressing MOG peptide and MHCII as a single chain fusion, where the exogenous peptide (MOG) is linked to the MHCII β-chain, which is linked to the MHCII α-chain, which is linked to the GPA membrane anchor. Cell culture and transduction is performed as described in the “Methods” section below to yield erythroid cells expressing MOG presented by MHCII on the cell surface, anchored with a GPA transmembrane domain.

[0923] Binding of an allophycocyanin (APC)-labelled or Phycoerythrin (PE)-labelled anti-MOG antibody is used to validate expression of the antigenic peptides in the engineered erythroid cells. Binding of an APC-labelled or PE-labelled anti-MHCII antibody is used to validate expression of the MHCII antigen presenting peptide in the engineered erythroid cells.

### Methods

[0924] Production of Lentiviral Vector

[0925] The gene encoding the MOG-MHCII-GPA fusion protein is cloned into the multiple cloning site of lentivirus vector pCDH with the MSCV promoter sequence from System Biosciences. Lentivirus is produced in 293T cells by transfecting the cells with pPACKH1 (System Biosciences) and pCDH lentivirus vector containing the MOG-MHCII-GPA gene. Cells are then placed in fresh culturing medium. The virus supernatant is collected 48 hours post-medium change by centrifugation at 1,500 rpm for 5 minutes. The supernatant is collected and frozen in aliquots at −80° C.

[0926] Expansion and Differentiation of Erythroid Cells

[0927] Human CD34+ cells derived from mobilized peripheral blood cells from normal human donors are purchased frozen from AllCells Inc. The expansion/differentiation procedure comprises 3 stages. In the first stage, thawed CD34+ erythroid precursors are cultured in Iscove's MDM medium comprising recombinant human insulin, human transferrin, recombinant human recombinant human stem cell factor, and recombinant human interleukin 3. In the second stage, erythroid cells are cultured in Iscove's MDM medium supplemented with bovine serum albumin, recombinant human insulin, human transferrin, human recombinant stem cell factor, human recombinant erythropoietin, and L-glutamine. In the third stage, erythroid cells are cultured in Iscove's MDM medium supplemented with human transferrin, recombinant human insulin, human recombinant erythropoietin, and heparin. The cultures are maintained at 37° C. in 5% CO2 incubator.

[0928] Transduction of Erythroid Precursor Cells

[0929] Erythroid precursor cells are transduced during step 1 of the culture process described above. Erythroid cells in culturing medium are combined with lentiviral supernatant and polybrene. Infection is achieved by spinoculation, spinning the plate at 2000 rpm for 90 minutes at room temperature. After spinoculation, the cells are incubated at 37° C. overnight.

[0930] Antibody Binding

[0931] Binding of an APC-labelled or PE-labelled anti-MHCII antibody (e.g. Anti-Human HLA-DR (HLA Class II) Monoclonal Antibody, Allophycocyanin Conjugated, Clone Immu-357 from Beckman Coulter Life Sciences) is used to validate expression of the MHCII antigen presenting peptide in the engineered erythroid cells. Binding of the antibody is measured by flow cytometry for APC fluorescence or PE fluorescence. A gate is set based on stained untransduced cells.

### Example 2. Generation and In Vitro Validation of Erythroid Cells Genetically Engineered to Co-Express a MOG-MHCII-GPA Fusion Protein and a Coinhibitor Polypeptide

[0932] Results

[0933] Erythroid cells are transduced to express a fusion protein comprising an exogenous antigenic peptide, MOG, fused to an exogenous antigen presenting polypeptide, MHCII, fused to the GPA transmembrane domain (GPA) (MOG-MHCII-GPA), as described in Example 1. The erythroid cells are co-transduced to additionally express an exogenous coinhibitory peptide, PD-L1. Cell culture and transduction is performed as described in the “Methods” section below to yield erythroid cells expressing MOG presented by MHCII on the surface, anchored with a GPA transmembrane domain, and co-expressing PD-L1.

[0934] Binding of an APC-labelled or PE-labelled anti-MHCII antibody is used to validate expression of the MHCII antigen presenting peptide in the engineered erythroid cells, also as described in Example 1. Binding of an APC-labelled or PE-labelled anti-PD-L1 antibody is used to validate expression of PD-L1 in the engineered erythroid cells.

[0935] The effect of the engineered erythroid cells (MOG-MHCII-GPA and PD-L1) is assessed by determining one or more effects on suppressing a T cell, including (1) inhibition of T cell activity, (2) inhibition of T cell proliferation, and/or (3) induction of apoptosis of a T cell.

### Methods

[0936] Production of Lentiviral Vector

[0937] The genes for MOG-MHCII-GPA fusion protein and PD-L1 are constructed. Genes encoding the proteins are cloned into the multiple cloning site of lentivirus vector pCDH with the MSCV promoter sequence from System Biosciences, such that one vector comprises the genes for both exogenous proteins. Lentivirus is produced in 293T cells by transfecting the cells with pPACKH1 (System Biosciences) and pCDH lentivirus vector containing genes for MOG-MHCII-GPA and PD-L1. Cells are placed in fresh culturing medium. The virus supernatant is collected 48 hours post-medium change by centrifugation at 1,500 rpm for 5 minutes. The supernatant is collected and frozen in aliquots at −80° C.

[0938] Transduction of Erythroid Precursor Cells

[0939] Expansion and differentiation of erythroid cells is performed according to Example 1, with the lentiviral vectors described above. Erythroid precursor cells are transduced during step 1 of the culture process. Erythroid cells in culturing medium are combined with lentiviral supernatant and polybrene. Infection is achieved by spinoculation, spinning the plate at 2000 rpm for 90 minutes at room temperature. After spinoculation, the cells are incubated at 37° C. overnight.

[0940] Antibody Binding

[0941] Binding of an APC-labelled or PE-labelled anti-MHCII antibody to validate expression of the MHCII antigen presenting peptide in the engineered erythroid cells is carried out as described in Example 1. Binding of APC-labelled or PE-labelled anti-PD-L1 antibody (e.g. APC anti-human CD274 (B7-H1, PD-L1) Antibody (Biolegend)) is used to validate expression of PD-L1 in the engineered erythroid cells. Binding of the antibodies is measured by flow cytometry for APC fluorescence or PE fluorescence. A gate is set based on stained untransduced cells.

[0942] Functional Validation Assays

[0943] Effects of the engineered erythroid cells coexpressing MOG-MHCII-GPA and PD-L1 on T cell suppression are assessed by determining one or more of (1) inhibition of T cell activity, (2) inhibition of T cell proliferation, and (3) induction of apoptosis of a T cell. Inhibition of T cell activity is determined, for example, by cytokine analysis of supernatants with commercially available ELISA kits for human IL-2, IFN-γ, and IL-10 (R&D Systems). For example, after treatment with the engineered erythroid cells, detection of inhibition of IL-2 secretion by activated T cells, would indicate an antiproliferative effect of engineered erythroid cells coexpressing MOG-MHCII-GPA and PD-L1. Inhibition of T cell proliferation is assayed, for example, by labelling cells with the fluorescent dye 5,6-carboxyfluorescein diacetate succinimidyl ester (CFSE). Those cells that proliferate in response to the engineered erythroid cell show a reduction in CFSE fluorescence intensity, which is measured directly by flow cytometry. Alternatively, radioactive thymidine incorporation can be used to assess the rate of growth of the T cells stimulated with erythroid cells engineered to co-express a MOG-MHCII-GPA fusion protein and a PD-L1 coinhibitor polypeptide. Induction of apoptosis of a T cell by the engineered erythroid cells coexpressing MOG-MHCII-GPA and PD-L1 is assayed using, for example, fluorochrome-conjugated annexin V staining. BATF is a bZIP transcription factor that plays an important role in regulating differentiation and function in many lymphocyte lineages. In the CD8+ T cell lineage, increased expression of BATF in exhausted CD8+ T cells suppresses their effector function. BAFT has been shown to be a central regulator of early effector CD8+ T cell differentiation. Accordingly, assessment of the expression of transcription factors, such as Basic leucine zipper transcription factor ATF-like (BATF), can be used to determine the effect of MOG-MHCII-GPA and PD-L1 on T cell suppression.

### Example 3. Generation and In Vitro Validation of Erythroid Cells Genetically Engineered to Co-Express a MOG-MHCII-GPA Fusion Protein and a Treg Expansion Polypeptide

### Results

[0944] Erythroid cells are transduced to express a fusion protein comprising an exogenous antigenic peptide, MOG, fused to an exogenous antigen presenting polypeptide, MHCII, fused to the GPA transmembrane domain (GPA) (MOG-MHCII-GPA), as described in Example 1. The erythroid cells are also transduced to additionally express an exogenous Treg expansion polypeptide, a TNFR2-specific TNFα polypeptide. Cell culture and transduction is performed as described in the “Methods” section below to yield erythroid cells expressing MOG presented by MHCII on the surface, anchored with a GPA transmembrane domain and co-expressing a TNFR2-specific TNFα polypeptide.

[0945] Binding of an APC-labelled or PE-labelled anti-TNFα is used to validate expression of the antigenic peptides in the engineered erythroid cells. Binding of an APC-labelled or PE-labelled anti-MHCII antibody is used to validate expression of the MHCII antigen presenting peptide in the engineered erythroid cells. Functional activity of the effect of the engineered erythroid cells (MOG-MHCII-GPA and TNFR2 specific TNFα) is assessed using a human CD4+ T-cell-based proliferative assay, as described in Example 2.

### Methods

[0946] Production of Lentiviral Vector

[0947] The genes for MOG-MHCII-GPA fusion protein and TNFR2 specific TNFα are constructed. Genes encoding the proteins are cloned into the multiple cloning site of lentivirus vector pCDH with the MSCV promoter sequence from System Biosciences, such that one vector comprises the genes for both exogenous proteins. Lentivirus is produced in 293T cells by transfecting the cells with pPACKH1 (System Biosciences) and pCDH lentivirus vector containing genes for MOG-MHCII-GPA and TNFR2-specific TNFα. Cells are placed in fresh culturing medium. The virus supernatant is collected 48 hours post-medium change by centrifugation at 1,500 rpm for 5 minutes. The supernatant is collected and frozen in aliquots at −80° C.

[0948] Transduction of Erythroid Precursor Cells

[0949] Expansion and differentiation of erythroid cells is performed according to Example 1, with the lentiviral vector described above. Erythroid precursor cells are transduced during step 1 of the culture process. Erythroid cells in culturing medium are combined with lentiviral supernatant and polybrene. Infection is achieved by spinoculation, spinning the plate at 2000 rpm for 90 minutes at room temperature. After spinoculation, the cells are incubated at 37° C. overnight.

[0950] Antibody Binding

[0951] Binding of an APC-labelled or PE-labelled anti-MHCII antibody to validate expression of the MHCII antigen presenting peptide in the engineered erythroid cells is carried out, also as described in Example 1. Binding of an APC-labelled or PE-labelled TNFα antibody is used to validate expression of TNFR2-specific TNFα mutant in the engineered erythroid cells. Binding of any one of the antibodies is measured by flow cytometry for APC fluorescence or PE fluorescence. A gate is set based on stained untransduced cells.

[0952] Functional Validation Assays

[0953] Functional activity is assessed using a human CD4+ T-cell-based proliferative assay. Cells are labeled with the fluorescent dye 5,6-carboxyfluorescein diacetate succinimidyl ester (CFSE). Those cells that proliferate in response to the engineered erythrocytes show a reduction in CFSE fluorescence intensity, which is measured directly by flow cytometry. Alternatively radioactive thymidine incorporation can be used to assess the rate of growth of the T cells stimulated with erythroid cells engineered to co-express a MOG-MHCII-GPA fusion protein and a CD25 specific-IL2 Treg expansion polypeptide.

Functional activity is also assessed using an in vitro Treg suppression assay. Such an assay is described in Collinson and Vignali (Methods Mol Biol. 2011; 707: 21-37, incorporated by reference in its entirety herein).

### Example 4. Activity of Enucleated Erythroid Cells Co-Expressing a MOG-MHCII-GPA Fusion Protein and a Coinhibitor Polypeptide or a Treg Expansion Polypeptide in a Murine EAE Model

[0954] Experimental autoimmune encephalomyelitis (EAE) is the model most commonly used to study efficacy of potential drugs for treatment of multiple sclerosis (MS). Because of its many similarities to MS, EAE is used to study pathogenesis of autoimmunity, CNS inflammation, demyelination, cell trafficking and tolerance induction. EAE is characterized by paralysis (in some models the paralysis is relapsing-remitting), CNS inflammation and demyelination. Hooke Kits™ for EAE Induction in C57BL/6 Mice (Hooke Laboratories) are used to induce EAE in female C57BL/6 mice. Using this method, EAE is induced in C57BL/6 mice by immunization with an emulsion of MOG35-55 or MOG1-125 in complete Freund's adjuvant (CFA), followed by administration of pertussis toxin in PBS, first on the day of immunization and then again the following day. Typical EAE onset is 9 to 14 days after immunization, with peak of disease 3 to 5 days after onset for each mouse. The peak lasts 1 to 3 days, followed by partial recovery. Around 25% of mice will show an increase in EAE severity (relapse) after initial partial recovery. This usually occurs 20-27 days after immunization. Groups of 10 to 12 mice, with 4 to 6 mice per cage are used.

[0955] Engineered enucleated erythroid cells comprising MOG-MHCII-GPA and PD-L1 or MOG-MHCII-GPA and CD25-specific IL2 are formulated in a buffer appropriate for enucleated erythroid cells. Treatment with the engineered enucleated erythroid cells begins at the time of EAE onset. If the engineered enucleated erythroid cells are being tested for their ability to reverse the course of chronic EAE, treatment is initiated 7-14 days after disease onset. Mice are assigned to treatment groups as they develop EAE (rolling enrollment) or at a fixed time after immunization, but always in a balanced manner to achieve groups with similar time of EAE onset and similar EAE onset scores. If enrollment is after EAE onset, mice are also balanced for maximum score before enrollment.

[0956] Dosing occurs at a clinical score=1, as set out in Table 25, below.

[0957] Dosing of the animals may be carried out 1-3 times per day. The frequency of dosing is every 2-14 days, for example every 2, 3, 4, 5, 6, 7, 8, 9, 10, 11, 12, 13 or 14 days.

[0958] Assessment of the effects of engineered enucleated erythroid cells expressing MOG-MHCII-GPA and PD-L1 or erythroid cells comprising MOG-MHCII-GPA and CD25-specific IL2 are determined using one or more of (1) EAE scoring; (2) change in body weight and (3) histological analysis, as described in detail below.

[0959] EAE Scoring

[0960] Typically, EAE is scored on scale of 0 to 5, including “in-between” scores (i.e. 0.5, 1.5, 2.5, 3.5) when the clinical picture lies between two defined scores. The scoring method differs slightly depending on the stage of disease (onset/peak vs. recovery), for each individual mouse. To avoid unconscious bias in scoring, mice are scored blind, by a person unaware of which mice have received which treatment.

TABLE 25
Mouse EAE scoring - onset and peak

| Score | Clinical observations |
|---|---|
| 0.0 | No obvious changes in motor function compared to non-immunized mice. |
| | When picked up by base of tail, the tail has tension and is erect. Hind legs are usually |
| | spread apart. When the mouse is walking, there is no gait or head tilting. |
| 0.5 | Tip of tail is limp. |
| | When picked up by base of tail, the tail has tension except for the tip. Muscle straining |
| | is felt in the tail, while the tail continues to move. |
| 1.0 | Limp tail. |
| | When picked up by base of tail, instead of being erect, the whole tail drapes over |
| | finger. Hind legs are usually spread apart. No signs of tail movement are observed. |
| 1.5 | Limp tail and hind leg inhibition. |
| | When picked up by base of tail, the whole tail drapes over finger. When the mouse is |
| | dropped on a wire rack, at least one hind leg falls through consistently. Walking is very |
| | slightly wobbly. |
| 2.0 | Limp tail and weakness of hind legs. |
| | When picked up by base of tail, the legs are not spread apart, but held closer together. |
| | When the mouse is observed walking, it has a clearly apparent wobbly walk. One foot |
| | may have toes dragging, but the other leg has no apparent inhibitions of movement. |
| | -OR- |
| | Mouse appears to be at score 0.0, but there are obvious signs of head tilting when the |
| | walk is observed. The balance is poor. |
| 2.5 | Limp tail and dragging of hind legs. |
| | Both hind legs have some movement, but both are dragging at the feet (mouse trips on |
| | hind feet). |
| | -OR- |
| | No movement in one leg/completely dragging one leg, but movement in the other leg. |
| | -OR- |
| | EAE severity appears mild when picked up (as score 0.0-1.5), but there is a strong |
| | head tilt that causes the mouse to occasionally fall over. |
| 3.0 | Limp tail and complete paralysis of hind legs (most common). |
| | -OR- |
| | Limp tail and almost complete paralysis of hind legs. One or both hind legs are able to |
| | paddle, but neither hind leg is able to move forward of the hind hip. |
| | -OR- |
| | Limp tail with paralysis of one front and one hind leg. |
| | -OR- |
| | ALL of: |
| | Severe head tilting, |
| | Walking only along the edges of the cage, |
| | Pushing against the cage wall, |
| | Spinning when picked up by base of tail. |
| 3.5 | Limp tail and complete paralysis of hind legs. In addition to: |
| | Mouse is moving around the cage, but when placed on its side, is unable to right itself. |
| | Hind legs are together on one side of body. |
| | -OR- |
| | Mouse is moving around the cage, but the hind quarters are flat like a pancake, giving |
| | the appearance of a hump in the front quarters of the mouse. |
| 4.0 | Limp tail, complete hind leg and partial front leg paralysis. |
| | Mouse is minimally moving around the cage but appears alert and feeding. |
| | Often euthanasia is recommended after the mouse scores 4.0 for 2 days. However, with |
| | daily s.c. fluids most C57BL/6 mice may recover to 3.5 or 3.0, while SJL mice may |
| | fully recover even if they reach score 4.0 at the peak of disease. When the mouse is |
| | euthanized because of severe paralysis, a score of 5.0 is entered for that mouse for the |
| | rest of the experiment. |
| 4.5 | Complete hind and partial front leg paralysis, no movement around the cage. Mouse is |
| | not alert. |
| | Mouse has minimal movement in the front legs. The mouse barely responds to contact. |
| | Euthanasia is recommended. When the mouse is euthanized because of severe |
| | paralysis, a score of 5.0 is entered for that mouse for the rest of the experiment. |
| 5.0 | Mouse is spontaneously rolling in the cage (euthanasia is recommended). |
| | -OR- |
| | Mouse is found dead due to paralysis. |
| | -OR- |
| | Mouse is euthanized due to severe paralysis. |

[0961] In the recovery stage of EAE, most mice will have a tail that is no longer limp but is not normal either; it feels rigid and is “hooked”. The hind legs may start moving (pedaling), but the mouse cannot walk. Either change makes scoring difficult. Therefore, if this is the case, the following modifications to the above scoring criteria are used for these mice, shown below in Table 26:

TABLE 26
Mouse EAE scoring - modified

| Score | Clinical observations |
|---|---|
| 0.0 | When held by the base of tail, tail is somewhat “hooked” and rigid, but tail makes |
| | complete rotations around the body axis (“helicopter”). Mouse is healthy. No signs |
| | of wobbling. |
| 0.5 | Mouse appears normal but tail is “hooked” and rigid. Tail does not make complete |
| | rotations around the body axis (“helicopter”). Mouse is healthy. No signs of |
| | wobbling. |
| 3.0 | Mouse is found on its side (as described for score 3.5 above), but there is excessive |
| | hind leg movement. Mouse cannot walk. |
| | -OR- |
| | Mouse has a wobbly walk (as described for score 2.5 above), and is unable to take |
| | more than two steps without falling on its side. The mouse is unable to right itself. |
| | -OR- |
| | Mouse has poor movement in the hind legs (as described for score 2.5 above), and |
| | has partial front leg paralysis evidenced by head held lower than normal and |
| | mouse's inability to right itself when placed on its side. |
| All other | Subtract 0.5 from the score of all mice with either a rigid, “hooked” tail or pedaling |
| scores | of hind legs. |

[0962] Body Weight

[0963] During the course of EAE, changes in body weight reflect disease severity. Mice often lose a small amount of weight on the day following immunization. This appears to be due to effects of the administered adjuvant and pertussis toxin. Mice then steadily increase their body weight until disease onset. On the day of EAE onset, mice consistently lose 1-2 g of their body weight (5-10% of body weight). The weight loss continues with the progression of EAE severity, with the loss reaching around 20% of their pre-onset body weight at the peak of disease. The weight loss is most likely due to both paralysis and reduced food intake as well as high production of pro-inflammatory cytokines such as TNF during the acute phase of inflammation. After the peak of disease is reached, mice slowly gain weight, even if their clinical score does not improve. This increase in weight may be due to down regulation of inflammation which results in lower levels of pro-inflammatory cytokines in blood. Untreated or vehicle-treated mice usually have around 90% of their pre-immunization body weight 28 days after immunization.

[0964] Histology

[0965] Histological analysis is performed either at the end of the study (usually around 28 days after immunization) or at the time when the vehicle group reaches peak of disease (usually 14-18 days after immunization). Inflammation in EAE normally starts in the lumbar region of the spinal cord, spreading to the entire spinal cord by the peak of disease.

[0966] At onset of disease, the number of inflammatory foci correlates strongly with disease severity. The number of foci increases somewhat until the peak of disease, when 6-15 inflammatory foci/section are typically found throughout the spinal cord. In the chronic stage of EAE (starting several days after the peak of disease), many inflammatory foci resolve, typically resulting in 3-4 inflammatory foci in each spinal cord section by approximately 28 days after immunization.

[0967] Because the largest numbers of inflammatory foci are present early in the course of disease, if histological analysis is performed at the end of the study, mice which have late EAE onset often have more inflammatory foci in their spinal cords than might be expected from their clinical score. For example, in a 28 day study a mouse with EAE onset on 27 days after immunization and an end clinical score of 2 will likely have more inflammatory foci than a mouse with EAE onset 9 days after immunization and an end score of 3 5 Similarly, a mouse which relapses shortly before the end of the study (relapse is defined as 1 or more points of increase in clinical score) will usually have more inflammatory foci at the end of the study than a mouse with stable chronic disease, even if the two have the same clinical score at the end of the study.

[0968] Demyelination is usually not found during the first two days after disease onset, but is found at the peak of disease (4-5 days after EAE onset) and continues during the chronic phase of EAE. Demyelination scores do not change much between the peak and 28 days after immunization and usually average between 1.2 and 2.5.

[0969] Demyelination is scored in both Luxol fast blue stained sections (LFB) and in H&E sections. In LFB sections, spinal cord white matter stains dark blue and demyelinated areas are a lighter blue color, and are associated with large vacuoles. In H&E stained sections disruption of normal structure with large vacuoles is indicative of demyelination.

[0970] Apoptotic cells are identified in H&E sections, and are usually not found during the first two days of disease development. They are found at the peak and during the chronic stage of EAE. The average number of apoptotic cells is usually between 2 and 4 per section.

[0971] In embodiments, administration of the enucleated erythroid cells expressing MOG-MHCII-GPA and PD-L1 or erythroid cells expressing MOG-MHCII-GPA and CD25-specific IL2 will lead to one or more of an improvement in EAE scoring or a reduction in the number of inflammatory foci compared to vehicle treated control mice.

### Example 5. Generation of Erythroid Cells Genetically Engineered to Express a PR1-HLA-A2-GPA Fusion Protein

### Results

[0972] Erythroid cells are transduced to express a fusion protein comprising PR1, a human leukocyte antigen (HLA)-A2 restricted peptide, fused to an exogenous antigen presenting polypeptide, MHCI HLA-A2, fused to the GPA transmembrane domain (GPA) (PR1-HLA-A2-GPA). FIG. 1B shows a schematic of the design for expressing PR1 peptide and MHCI as a single chain fusion. Cell culture and transduction is performed as described in the “Methods” section below to yield erythroid cells expressing PR1 presented by MHCI on the surface, anchored with a GPA transmembrane domain.

[0973] Binding of an APC-labelled or PE-labelled anti-PR1 antibody is used to validate expression of the antigenic peptide in the engineered erythroid cells. Binding of an APC-labelled or PE-labelled anti-MHCI antibody is used to validate expression of the MHCI antigen presenting peptide in the engineered erythroid cells.

### Methods

[0974] Production of Lentiviral Vector

[0975] The gene encoding the PR1-HLA-A2-GPA fusion protein is cloned into the multiple cloning site of lentivirus vector pCDH with the MSCV promoter sequence from System Biosciences. Lentivirus is produced in 293T cells by transfecting the cells with pPACKH1 (System Biosciences) and pCDH lentivirus vector containing PR1-HLA-A2-GPA gene. Cells are then placed in fresh culturing medium. The virus supernatant is collected 48 hours post-medium change by centrifugation at 1,500 rpm for 5 minutes. The supernatant is collected and frozen in aliquots at −80° C.

[0976] Expansion and Differentiation of Erythroid Cells

[0977] Human CD34+ cells derived from mobilized peripheral blood cells from normal human donors are purchased frozen from AllCells Inc. The expansion/differentiation procedure comprises 3 stages. In the first stage, thawed CD34+ erythroid precursors are cultured in Iscove's MDM medium comprising recombinant human insulin, human transferrin, recombinant human recombinant human stem cell factor, and recombinant human interleukin 3. In the second stage, erythroid cells are cultured in Iscove's MDM medium supplemented with bovine serum albumin, recombinant human insulin, human transferrin, human recombinant stem cell factor, human recombinant erythropoietin, and L-glutamine. In the third stage, erythroid cells are cultured in Iscove's MDM medium supplemented with human transferrin, recombinant human insulin, human recombinant erythropoietin, and heparin. The cultures are maintained at 37° C. in 5% CO2 incubator.

[0978] Transduction of Erythroid Precursor Cells

[0979] Erythroid precursor cells are transduced during step 1 of the culture process described above. Erythroid cells in culturing medium are combined with lentiviral supernatant and polybrene. Infection is achieved by spinoculation, spinning the plate at 2000 rpm for 90 minutes at room temperature. After spinoculation, the cells are incubated at 37° C. overnight.

[0980] Antibody Binding

[0981] Binding of an allophycocyanin (APC)-labelled or Phycoerythrin (PE)-labelled anti-PR1-HLA-A2 antibody (e.g. anti-PR1/HLA-A2 monoclonal antibody Hu8F4) is used to validate expression of PR1-HLA-A2-GPA fusion protein in the engineered erythroid cells. Binding of the antibody is measured by flow cytometry for APC fluorescence or PE fluorescence. A gate is set based on stained untransduced cells.

[0982] Binding of an APC-labelled or PE-labelled anti-MHCI antibody (e.g. HLA-A2 Antibody (MA1-80117), Invitrogen)) is used to validate expression of the MHCI antigen presenting peptide in the engineered erythroid cells. Binding of any one of the antibodies is measured by flow cytometry for APC fluorescence or PE fluorescence. A gate is set based on stained untransduced cells.

### Example 6. Generation and In Vitro Validation of Erythroid Cells Genetically Engineered to Co-Express a PR1-HLA-A2-GPA Fusion Protein and a Costimulatory Polypeptide

### Results

[0983] Erythroid cells are transduced to express a fusion protein comprising PR1, a human leukocyte antigen (HLA)-A2 restricted peptide, fused to an exogenous antigen presenting polypeptide, MHCI HLA-A2, fused to the GPA transmembrane domain (PR1-HLA-A2-GPA). FIG. 1B shows a schematic of the design for expressing PR1 peptide and MHCI as a single chain fusion. The erythroid cells are also transduced to additionally express an exogenous costimulatory peptide, 4-1BBL. Cell culture and transduction is performed as described in “Methods” section below to yield erythroid cells expressing PR1 presented by MHCI on the surface, anchored with a GPA transmembrane domain.

[0984] Binding of an APC-labelled or PE-labelled anti-PR1 or anti-4-1BBL antibody to the exogenous peptides PR1 and 4-1BBL is used to validate expression of the respective peptides in the engineered erythroid cells. Binding of an APC-labelled or PE-labelled anti-MHCI antibody is used to validate expression of the MHCI antigen presenting peptide in the engineered erythroid cells.

[0985] Functional activity of the effect of the engineered erythroid cells (PR1-HLA-A2-GPA, 4-1BBL) is assessed for their ability to stimulate the initial activation and proliferation of primary CD8+ T cells.

### Methods

[0986] Production of Lentiviral Vector

[0987] The genes for PR1-HLA-A2-GPA fusion protein and 4-1BBL are constructed. Genes encoding the proteins are cloned into the multiple cloning site of lentivirus vector pCDH with the MSCV promoter sequence from System Biosciences, such that one vector comprises the genes for both exogenous proteins. Lentivirus is produced in 293T cells by transfecting the cells with pPACKH1 (System Biosciences) and pCDH lentivirus vector containing genes for PR1-HLA-A2-GPA and 4-1BBL. Cells are placed in fresh culturing medium. The virus supernatant is collected 48 hours post-medium change by centrifugation at 1,500 rpm for 5 minutes. The supernatant is collected and frozen in aliquots at −80° C.

[0988] Transduction of Erythroid Precursor Cells

[0989] Expansion and differentiation of erythroid cells is performed according to Example 5, with the lentiviral vectors described above. Erythroid precursor cells are transduced during step 1 of the culture process. Erythroid cells in culturing medium are combined with lentiviral supernatant and polybrene. Infection is achieved by spinoculation, spinning the plate at 2000 rpm for 90 minutes at room temperature. After spinoculation, the cells are incubated at 37° C. overnight

[0990] Antibody Binding

[0991] Binding of an APC-labelled or PE-labelled anti-PR1 antibody is used to validate expression of the PR1-HLA-A2-GPA fusion in the engineered erythroid cells, as described in Example 5. Binding of an APC-labelled or PE-labelled anti-MHCI antibody is used to validate expression of the MHCI antigen presenting polypeptide in the engineered erythroid cells, also as described in Example 5. Binding of an APC-labelled or PE-labelled anti-4-1BBL antibody (R&D Systems) is used to validate expression of 4-1BBL in in the engineered erythroid cells. Binding of any one of the antibodies is measured by flow cytometry for APC fluorescence or PE fluorescence. A gate is set based on stained untransduced cells.

[0992] Functional Validation Assays

[0993] The erythroid cells genetically engineered to co-express a PR1-HLA-A2-GPA fusion protein and a 4-1BBL costimulatory polypeptide are tested for their ability to stimulate the initial activation and proliferation of primary CD8+ T cells. The T cells are stimulated with the engineered erythroid cells, and the following parameters are evaluated: (1) rate of growth of the T cells stimulated with the aAPCs, as determined by a standard thymidine incorporation assay, which gives the total amount of DNA synthesized in a bulk culture; (2) induction of proliferation and cell division of CD4+ T cells; (3) viability of the CD8+ T cells stimulated by the various aAPCs during culture by fluorescent staining with annexin V and propidium iodide; (4) Bcl-xL and IL-2 expression, two genes involved in T cell survival and proliferation, respectively, using quantitative real time RT-PCR in order to determine the levels of steady-state mRNA coding for Bcl-xL and IL-2.

[0994] Cytokine Production

[0995] Cytokines are important effector molecules and provide insight into T cell differentiation. The ability of erythroid cells engineered to co-express a PR1-HLA-A2-GPA fusion and the costimulatory peptide 4-1BBL to induce certain cytokines from CD8 T cells is quantitated, for example IL-2 (a key T cell growth factor for ex vivo expansion and a cell's ability to induce IL-2 correlates well with its long term growth potential); IL-4 (a marker for TH2 differentiation); and IL-10 (an immunosuppressive cytokine that may be surrogate for T regulatory cell outgrowth). Other cytokines include, but are not limited to, TGF-β (for the same rationale as IL-10); IFN-γ (a marker for TH1 differentiation and an important effector cytokine); and TNFα (an important effector cytokine). Quantitation can be carried out using the ELISPOT (enzyme-linked immunospot) technique, that detects T cells that secrete a given cytokine (e.g., gamma interferon [IFN-γ]) in response to an antigenic stimulation. T cells are cultured with antigen-presenting cells in wells which have been coated with anti-IFN-γ antibodies. The secreted IFN-γ is captured by the coated antibody and then revealed with a second antibody coupled to a chromogenic substrate. Thus, locally secreted cytokine molecules form spots, with each spot corresponding to one IFN-γ-secreting cell. The number of spots allows one to determine the frequency of IFN-γ-secreting cells specific for a given antigen in the analyzed sample. The ELISPOT assay has also been described for the detection of tumor necrosis factor alpha, interleukin-4 (IL-4), IL-5, IL-6, IL-10, IL-12, granulocyte-macrophage colony-stimulating factor.

### Example 7. Activity of Enucleated Erythroid Cells Engineered to Co-Express a PR1-HLA-A2-GPA Fusion Protein and a Costimulatory Polypeptide in an Acute Myelogenous Leukemia (AML) Murine Cancer Model In Vivo

[0996] PR1 peptide has been shown to be a human leukemia antigen. PR1-specific cytotoxic T lymphocytes (CTL) elicited in vitro from healthy donors have been shown to lyse P3-expressing AML cells from patients. Further, it has been shown that adoptive transfer of PR1-CTL generated in vitro is associated with reduced AML cells in NOD/SCID mice (Molldrem et al., Cancer Res. 1999; 59:2675-2681; Molldrem et al., Nat Med. 2000; 6:1018-1023; Rezvani et al., Blood. 2003; 102:2892-2900; the entire contents of each of which are incorporated by reference herein).

[0997] The well-established NOD/SCID mouse is used as a model to determine whether bone marrow aspirate from mice that received PR1-CTL have more AML blasts in a hypercellular marrow, compared to mice receiving PR1-CTL plus the enucleated erythroid cells engineered to co-express a PR1-HLA-A2-GPA fusion protein and 4-1BBL. The model is also used to determine if PR1-CTL levels are higher in mice receiving enucleated erythroid cells engineered to co-express a PR1-HLA-A2-GPA fusion protein and 4-1BBL as compared to mice that did not receive the enucleated erythroid cells. The model is also used to determine if mice receiving enucleated erythroid cells engineered to co-express a PR1-HLA-A2-GPA fusion protein and 4-1BBL maintain a CD45RA-CD28+ effector phenotype as compared to mice that did not receive the enucleated erythroid cells.

[0998] PR1-CTL Production

[0999] PR1-CTL are expanded in bulk culture using a method described previously, with some modification (Molldrem et al., Blood. 1996; 88:2450-2457, the entire content of which is incorporated by reference herein). Autologous dendritic cells (DC) are generated from a HLA-A2.1+ healthy donor. Briefly, adherent monocytes from a normal donor are stimulated for 7 days with a combination of cytokines granulocyte-macrophage colony-stimulating factor (GM-CSF) (500 IU/mL) and interferon (INF)-α. The activated DC are collected, and a fraction of the cells is analyzed by FACS for CD80 and CD14 expression. In the presence of IL-2 (20 IU/m1), DC are pulsed with PR1, PR2 or pp65 peptides. PR2 (RLFPDFFTRV (SEQ ID NO: 720)) is another HLA-A2-restricted peptide derived from proteinase 3, but PR2-CTL are incapable of killing leukemia cells (Molldrem et al., Blood. 1996). Peripheral blood mononuclear cells (PMBC) are stimulated weekly with peptide-pulsed autologous DC for 3-4 weeks. A fraction of PR1-CTL is harvested and tested for specific lysis using a CTL cytotoxicity assay used previously (Molldrem et al., Blood. 1996, the entire content of which is incorporated by reference herein). The remaining CTL from bulk culture is purified with a sorter using antibodies to deplete CD4, B and natural killer (NK) cells simultaneously.

[1000] NOD/SCID AML Xenograft Model

[1001] The NOD/SCID-HLA-A2.1 mice are used for the engraftment of AML cells. Human AML bone marrow samples are obtained, and AML cells from patients are transferred intravenously into irradiated (200 cGy) NOD/SCID mice. AML bone marrow samples are chosen based on the ability to engraft successfully in bone marrow at various doses 2 weeks post-transfer. A small number of PR1-specific T cells are adoptively transferred to the NOD-SCID mouse engrafted with AML, either alone or together with enucleated erythroid cells engineered to co-express a PR1-HLA-A2-GPA fusion protein and 4-1BBL. Animals are killed 2 weeks post-transfer, and tissues are harvested for flow cytometry (FACS) and immunohistochemistry (IHC) analysis. Human CD45 Ab and mouse CD45.2 Ab are used to identify cells of human origin. The differential cell counts are performed on cyto spin preparations and smears prepared from bone marrow. Formalin-fixed paraffin-embedded sections of tissue organs harvested are stained with hematoxylin and eosin stain.

[1002] CD45RA-CD28+ Effector Phenotype

[1003] An APC-labelled or PE-labelled anti-CD45RA antibody (Biolegend) and an APC-labelled or PE-labelled anti-CD28 antibody (Biolegend) is used to validate CD45RA-CD28+ effector phenotype. Binding of the antibody is measured by flow cytometry for APC fluorescence or PE fluorescence. A gate is set based on stained untransduced cells.

[1004] In embodiments, bone marrow aspirate from mice that received PR1-CTL have more AML blasts in a hypercellular marrow, compared to mice receiving PR1-CTL plus the enucleated erythroid cells engineered to co-express a PR1-HLA-A2-GPA fusion protein and 4-1BBL. In other embodiments, PR1-CTL levels are higher in mice receiving enucleated erythroid cells engineered to co-express a PR1-HLA-A2-GPA fusion protein and 4-1BBL as compared to mice that did not receive the enucleated erythroid cells. In other embodiments, mice receiving enucleated erythroid cells engineered to co-express a PR1-HLA-A2-GPA fusion protein and 4-1BBL maintain a CD45RA-CD28+ effector phenotype as compared to mice that did not receive the enucleated erythroid cells.

### Example 8. Generation and In Vitro Validation of Erythroid Cells Genetically Engineered to Co-Express a Gp100-H-2Db-GPA Fusion Protein and a Costimulatory Polypeptide

### Results

[1005] Erythroid cells are transduced to express a fusion protein comprising gp100, a melanoma antigen, fused to an exogenous antigen presenting polypeptide, MHCI H-2Db, fused to the GPA transmembrane domain (gp100-H-2Db-GPA). The erythroid cells are also transduced to additionally express an exogenous costimulatory peptide, 4-1BBL. Cell culture and transduction is performed as described in the “Methods” section below to yield erythroid cells expressing gp100 presented by MHCI on the surface, anchored with a GPA transmembrane domain.

[1006] Binding of an APC-labelled or PE-labelled anti-gp100 or anti-41-BBL antibody to the exogenous peptides gp100 and 4-1BBL is used to validate expression of the respective peptides in the engineered erythroid cells. Binding of an APC-labelled or PE-labelled anti-MHCI antibody is used to validate expression of the MHCI antigen presenting peptide in the engineered erythroid cells.

[1007] Functional activity of the effect of the engineered erythroid cells (gp100-H-2Db-GPA, 4-1BBL) is assessed for their ability to stimulate the initial activation and proliferation of primary CD8+ T cells.

[1008] Methods

[1009] Production of Lentiviral Vector

[1010] The genes for gp100-H-2Db-GPA fusion protein and 4-1BBL are constructed. Genes encoding the proteins are cloned into the multiple cloning site of lentivirus vector pCDH with the MSCV promoter sequence from System Biosciences, such that one vector comprises the genes for both exogenous proteins. Lentivirus is produced in 293T cells by transfecting the cells with pPACKH1 (System Biosciences) and pCDH lentivirus vector containing genes for gp100-H-2Db and 4-1BBL. Cells are placed in fresh culturing medium. The virus supernatant is collected 48 hours post-medium change by centrifugation at 1,500 rpm for 5 minutes. The supernatant is collected and frozen in aliquots at −80° C.

[1011] Transduction of Erythroid Precursor Cells

[1012] Expansion and differentiation of erythroid cells is performed according to Example 5, with the lentiviral vector described above. Erythroid precursor cells are transduced during step 1 of the culture process. Erythroid cells in culturing medium are combined with lentiviral supernatant and polybrene. Infection is achieved by spinoculation, spinning the plate at 2000 rpm for 90 minutes at room temperature. After spinoculation, the cells are incubated at 37° C. overnight.

[1013] Antibody Binding

[1014] Binding of biotinylated anti-gp100 antibody (e.g. TB-M505-M, MBL International Corp.) is used to validate expression of gp100-H-2Db-GPA fusion protein in the engineered erythroid cells. Binding of the biotinylated antibody is detected with avidin conjugates in cell surface labeling and flow cytometry/fluorescence-activated cell sorting (FACS). Binding of an APC-labelled or PE-labelled anti-MHCI antibody (e.g. MHC Class I (H-2Db) Monoclonal Antibody (28-14-8), PE, Thermofisher Scientific) is used to validate expression of the MHCI antigen presenting peptide in the engineered erythroid cells. Binding of an APC-labelled or PE-labelled anti-4-1BBL antibody (R&D Systems) is used to validate expression of 4-1BBL in in the engineered erythroid cells. Binding of any one of the antibodies is measured by flow cytometry for APC fluorescence or PE fluorescence. A gate is set based on stained untransduced cells.

[1015] Functional Validation Assays

[1016] The erythroid cells genetically engineered to co-express a gp100-H-2Db-GPA fusion protein and a 4-1BBL costimulatory polypeptide are tested for their ability to stimulate the initial activation and proliferation of primary CD8+ T cells. The T cells are stimulated with the engineered erythroid cells, and the following parameters are evaluated: (1) rate of growth of the T cells stimulated with the aAPCs, as determined by a standard thymidine incorporation assay, which gives the total amount of DNA synthesized in a bulk culture; (2) induction of proliferation and cell division of CD4+ T cells; (3) viability of the CD8+ T cells stimulated by the various aAPCs during culture by fluorescent staining with annexin V and propidium iodide; (4) Bcl-xL and IL-2 expression, two genes involved in T cell survival and proliferation, respectively, using quantitative real time RT-PCR in order to determine the levels of steady-state mRNA coding for Bcl-xL and IL-2.

[1017] Cytokine Production

[1018] The ability of erythroid cells engineered to co-express a gp100-H-2Db-GPA fusion and the costimulatory peptide 4-1BBL to induce certain cytokines from CD8 T cells is quantitated, for example, IL-2 (a key T cell growth factor for ex vivo expansion and a cell's ability to induce IL-2 correlates well with its long term growth potential); IL-4 (a marker for TH2 differentiation); and IL-10 (an immunosuppressive cytokine that may be surrogate for T regulatory cell outgrowth). Other cytokines include, but are not limited to, TGF-β (for the same rationale as IL-10); IFN-γ (a marker for TH1 differentiation and an important effector cytokine); and TNFα (an important effector cytokine). Quantitation can be carried out using the ELISPOT (enzyme-linked immunospot) technique, that detects T cells that secrete a given cytokine (e.g., gamma interferon [IFN-γ]) in response to an antigenic stimulation. T cells are cultured with antigen-presenting cells in wells which have been coated with anti-IFN-γ antibodies. The secreted IFN-γ is captured by the coated antibody and then revealed with a second antibody coupled to a chromogenic substrate. Thus, locally secreted cytokine molecules form spots, with each spot corresponding to one IFN-γ-secreting cell. The number of spots allows one to determine the frequency of IFN-γ-secreting cells specific for a given antigen in the analyzed sample. The ELISPOT assay has also been described for the detection of tumor necrosis factor alpha, interleukin-4 (IL-4), IL-5, IL-6, IL-10, IL-12, granulocyte-macrophage colony-stimulating factor.

### Example 9. Activity of Enucleated Erythroid Cells Engineered to Co-Express a Gp100-H-2Db-GPA Fusion Protein and a Costimulatory Polypeptide in a B-16 Mouse Tumor Model for Melanoma

[1019] A subset of patients with metastatic melanoma can be successfully treated by the administration of recombinant interleukin-2 (rIL-2), sometimes given together with autologous melanoma-reactive lymphocytes that have been expanded ex vivo (Rosenberg, 1997; Rosenberg, 1999). Recently, a number of different laboratories have used these anti-tumor lymphocytes to clone melanoma-associated antigens, which have generally been nonmutated melanocyte differentiation antigens (MDA), a group that includes gp100 (Overwijk and Restifo, Curr Protoc Immunol. 2001 May; CHAPTER: Unit-20.1, the entire content of which is incorporated herein by reference).

[1020] The subcutaneous model is widely used for the evaluation of therapy in many tumor models, including B16 melanoma. Upon subcutaneous injection, B16 will form a palpable tumor in 5 to 10 days and grow to a 1×1×1-cm tumor in 14 to 21 days. When allowed to grow larger, the tumors often become necrotic in the center and begin to ulcerate or bleed; it is advisable to sacrifice the mice before this point. The typical dose used is 1×10⁵ cells/mouse, which is 1.5 to 2 times the minimal tumorigenic dose in normal C57BL/6 mice.

[1021] The B16 melanoma mouse model is used as a model to determine whether enucleated erythroid cells engineered to co-express a gp100-H-2Db-GPA fusion and the costimulatory peptide 4-1BBL, can eliminate B16 melanoma cells in the mouse.

[1022] Methods for B-16 cell preparation and inoculation of mice are described in Overwijk and Restifo (Curr Protoc Immunol. 2001 May; CHAPTER: Unit-20.1, incorporated by reference in its entirety herein). Dosing with the engineered erythroid cells is started when the tumors become palpable. The cells are formulated in PBS or other buffer.

[1023] In embodiments, administration of the engineered enucleated erythroid cells will lead to one or both of inhibition of tumor cell engraftment or reduction of the tumor size, compared to unmodified control cells.

### Example 10. Erythroid Cells Engineered to Present MHCI (Ovalbumin) and 4-1BBL Activate Ova-Specific T Cells In Vitro

[1024] Murine erythroid cells were conjugated with MHCI presenting ovalbumin peptide and 4-1BBL using the click methodology (click chemistry for functionalizing erythroid cells is described in International Application No. PCT/US2018/000042, which claims priority to U.S. Provisional Application No. 62/460,589, filed Feb. 17, 2017 and U.S. Provisional Application No. 62/542,142, filed Jul. 8, 2017, incorporated by reference in their entireties herein). Briefly, mouse peripheral blood was filtered through a PAL de-leukocyte filter and labeled with 0.04 mM 6′ Azido-NHS-ester in pH8 PBS for 30 min at room temperature. Azido-labeled mRCT were incubated with 40 uM m4-1BBL-DBCO-Thiolinker at room temperature for 1h and further incubated at 4 C overnight. mRCT-m4-1BBL were clicked with biotin by incubating with 1 uM water soluble DBCO biotin at room temperature for 1h, followed by incubating with neutravidin at a 1:1 molar ratio of biotin and neutravidin. Neutravidin bound cells were then incubated with biotinylated H-2Kb SIINFEKL (SEQ ID NO: 721) monomer at a 1:1 molar ratio of biotin and monomer for 1h at room temperature.

[1025] CD8+ T cells were purified from secondary lymphoid organs of OT1 transgenic mice using a negative selection kit from Miltenyi and labeled with 1 uM CFSE. 2E5 CFSE labeled OT1 CD8+ T cells were plated into each well of a 96 well plate. Varying amounts (3E6, 1E6, 3.3E5, or 1.1E5 cells) of mRCT, mRCT-4-1BBL, mRCT-MHC(ova), or mRCT-MHC(ova)+4-1BBL were plated in cRPMI media into the wells containing OT1 CD8+ T cells and incubated for two days at 37 C. Culture supernatant was collected to measure IL2 and IFN-γ concentration by cytokine ELISA. Cells were washed and stained with anti-CD8, livedead dye, and anti-CD44 to quantify T cell expansion and activation.

[1026] As shown in FIG. 2, murine erythroid cells presenting MHC I (ovalbumin) and 4-1BBL on the cell surface, or murine erythroid cells presenting MHC I (ovalbumin) alone (RCT-aAPC (ova)), potently activate ova-specific T cells in vitro. These results demonstrate the ability to potently and selectively expand and activate an antigen-specific T cell using the engineered enucleated cells as described herein.

[1027] In similar studies to those presented above, human erythroid cells were transduced to co-express ova and 4-1BBL, rather than conjugated using the click methodology. In these experiments, CD34+ cells from a healthy human donor were expanded and transduced with HA-GPA, GPA-m4-1BBL, or b2ML-OVAH2Kb-GPA concentrated Lentivirus at MOI 20. hRCT-MHC(ova)+4-1BBL were generated by double (simultaneous) transduction with GPA-m4-1BBL and b2ML-OVAH2Kb-GPA concentrated Lentivirus at MOI 20 respectively. hRCT were harvested at maturation day 9 and filtered through PAL de-leukocyte filter to enrich for enucleated cells. Expression level and copy number were determined by staining with anti-m4-1BBL and anti-SIINFEKL (SEQ ID NO: 721) bound H2Kb and calibrated according to Bangs beads standard curves.

[1028] CD8+ T cells were purified from secondary lymphoid organs of OT1 transgenic mice using negative selection kit from Miltenyi and labeled with 1 uM CFSE. 3E5 CFSE labeled OT1 CD8+ T cells are plated into each well of a 96 well plate. Varying amounts (3E6, 6E5, 3E5 or 1.5E5 cells) of hRCT-HA-GPA, hRCT-m4-1BBL, hRCT-MHC(ova), or hRCT-MHC(ova)+4-1BBL were plated into the wells containing OT1 CD8+ T cells. The number of hRCT-m4-1BBL and hRCT-MHC(ova) cells in each well were adjusted so that the number of molecules of m4-1BBL and MHC(ova) match the total molecule numbers in wells of the corresponding hRCT-MHC(ova)+m4-1BBL. hRCT and OT1 cells were incubated at 37 C for 3 days. Culture supernatant was collected to measure IL2 and IFN-γ concentration by cytokine ELISA. The cells were washed and stained with anti-CD8, livedead dye, and anti-CD44 to quantify T cell expansion and activation. The results from this study showed that human erythroid cells transduced to co-express ova and m4-1BBL potently activate the ova-specific T cells in vitro demonstrating high CD44 expression, similar to the results obtained using mRCTs constructed with the click technology (described above and presented in FIG. 2).

### Example 11. Ovalbumin-Specific T Cells Expanded and Activated by Erythroid Cells Presenting MHCI (Ovalbumin) and 4-1BBL Selectively Kill Ovalbumin-Expressing Tumor Cells In Vitro

[1029] Murine erythroid cells were conjugated with MHCI presenting ovalbumin peptide and 4-1BBL using the click methodology (click chemistry for functionalizing erythroid cells is described in U.S. Provisional Application No. 62/460,589, filed Feb. 17, 2017 and U.S. Provisional Application No. 62/542,142, filed Jul. 8, 2017, incorporated by reference in their entireties herein). Briefly, mouse peripheral blood was filtered through a PAL de-leukocyte filter and labeled with 0.04 mM 6′ Azido-NHS-ester in pH8 PBS for 30 min at room temperature. Azido-labeled mRCT were incubated with 40 uM m4-1BBL-DBCO-Thiolinker at room temperature for 1h and further incubated at 4 C overnight. mRCT-m4-1BBL were clicked with biotin by incubating with 1 uM water soluble DBCO biotin at room temperature for 1h, followed by incubating with neutravidin at a 1:1 molar ratio of biotin and neutravidin. Neutravidin bound cells were then incubated with biotinylated H-2Kb SIINFEKL (SEQ ID NO: 721) monomer at a 1:1 molar ratio of biotin and monomer for 1h at room temperature.

[1030] CD8+ T cells were purified from secondary lymphoid organs of OT1 transgenic mice using negative selection kit from Miltenyi and labeled with 1 uM CFSE. 1.2E6 CFSE labeled OT1 CD8+ T cells were cultured with 1.2E7 aAPC (mRCT-4-1BBL H2Kb OVA) in each well of a 24 well plate. OT1 cells were harvested after a three day incubation and treated with ACK buffer to lyse the mRCT. To test the activity of the OT1 cells on tumor cells, 1E4 cell trace far red-labeled tumor cells, either parental tumor cells, EL4, or tumor cells expressing ovalbumin, EG7.OVA, (each target cells) were then plated into each well of 96 well U bottom plates. OT1 cells (effector cells) were added into the wells at 10:1, 5:1, 2:1, 1:1 or 0:1 effector to target (E:T) ratio. After a 22 hour incubation, cells were stained with livedead dye and fixed with 2% paraformaldehyde to enumerate live target cells in each well.

[1031] The results of this experiment are shown in FIG. 3. Strikingly, ovalbumin-specific T cells (OT1-T cells) that were expanded and activated by murine erythroid cells presenting MHC I (ovalbumin) and 4-1BBL were observed to selectively kill ovalbumin-expressing tumor cells, or EG7.OVA cells, while the parental cells that do not express ovalbumin (EL4 cells) were not attacked and killed. The ability to significantly expand and activate a specific tumor specific T cell population to kill tumors in vivo has parallels with CAR T approaches, which administer a tumor specific T cell population that can expand, sometimes uncontrollably, in the patient. A significant advantage of the present invention is that, by controlling the dose of the engineered enucleated cells described herein, the expansion of the tumor-specific T cells and ultimately the safety and efficacy of therapy can be more effectively controlled.

### Example 12. Erythroid Cells Engineered to Present MHCI (Ovalbumin) and 4-1BBL Activate Ova-Specific T Cells, which Traffic to Lymph Nodes, In Vivo

[1032] Murine erythroid cells were conjugated with MHCI presenting ovalbumin peptide and 4-1BBL using the click methodology (click chemistry for functionalizing erythroid cells is described in U.S. Provisional Application No. 62/460,589, filed Feb. 17, 2017 and U.S. Provisional Application No. 62/542,142, filed Jul. 8, 2017, incorporated by reference in their entireties herein). Briefly, mouse peripheral blood was filtered through a PAL de-leukocyte filter and labeled with 0.04 mM 6′ Azido-NHS-ester in pH8 PBS for 30 min at room temperature. Azido-labeled mRCT were incubated with 40 uM m4-1BBL-DBCO-Thiolinker at room temperature for 1h and further incubated at 4 C overnight. mRCT-m4-1BBL were clicked with biotin by incubating with 1 uM water soluble DBCO biotin at room temperature for 1h, followed by incubating with neutravidin at a 1:1 molar ratio of biotin and neutravidin. Neutravidin bound cells were then incubated with biotinylated H-2Kb SIINFEKL (SEQ ID NO: 721) monomer at a 1:1 molar ratio of biotin and monomer for 1h at room temperature.

[1033] CD8+ T cells were purified from secondary lymphoid organs of RAG2−/−OT1 transgenic mice using negative selection kit from Miltenyi and labeled with fluorescent dye (10 uM CFSE). 1.8E6 OT1 cells were injected intravenously into C57BL/6 mice on day −1. On day 0, mice were injected intravenously with 1E8 aAPC (mRCT-4-1BBL or mRCT-4-1BBL H2Kb OVA). On day 4, mice were sacrificed and single cell suspensions from their spleen and lymph nodes were stained with NIR Zombie, APC 41BB, Pacific blue CD44, BV650 CD8 and BV785 CD62L and analyzed by flow cytometry. Proliferation of OT1 T cells was monitored by following dilution of fluorescent dye signal in lymph nodes or spleen. A schematic depicting the design of the experiment is shown in FIG. 4A. The results of the experiment are shown in FIGS. 4B and 4C, where FIG. 4B is a schematic of representative data, showing that mRCT-4-1BBL OVA specifically expand and activate OT1-T cells, while mRCT-4-1BBL without MHCI presenting ovalbumin peptide on the cell surface do not expand and activate OT1-T cells.

[1034] The results of this experiment in vivo in mice, as shown in FIG. 4C, demonstrated that mRCT-4-1BBL H2Kb OVA specifically expand and activate OTI-T cells as evidenced by increased CD44 expression. Further, it was found that the majority of OT1-T cells being activated display a central memory phenotype, which has been found to be a key population driving the effectiveness of T cell based therapies. The results further showed that these OTI-T cells traffic to the lymph nodes, where they are expected to undergo further expansion and activation, supporting their potential to effectively mobilize within the body and to the tumor to support a robust anti-tumor response In contrast, mRCT-4-1BBL without MHCI presenting ovalbumin peptide on the cell surface did not expand or activate OTI-T cells, thereby indicating that mRCT-aAPCs mimic the function of antigen presenting cells in vivo.

### Example 13. Generation and In Vitro Validation of Erythroid Cells Genetically Engineered to Co-Express a Gp350-HLA-A2-GPA Fusion Protein and a Costimulatory Polypeptide

### Results

[1035] Erythroid cells are transduced to express a fusion protein comprising an immunogenic peptide from an Epstein Barr virus-encoded glycoprotein 350 (gp350) that is (HLA)-A2 restricted, fused to an exogenous antigen presenting polypeptide, MHCI HLA-A2, fused to the GPA transmembrane domain (gp350-HLA-A2-GPA). An exemplary gp350 immunogenic peptide used is VLQWASLAV (SEQ ID NO: 698). The erythroid cells are also transduced to additionally express an exogenous costimulatory peptide, 4-1BBL. Cell culture and transduction is performed as described in “Methods” section below to yield erythroid cells expressing gp350 presented by MHCI on the surface, anchored with a GPA transmembrane domain.

[1036] Binding of an APC-labelled or PE-labelled anti-gp350 or anti-4-1BBL antibody to the exogenous peptides gp350 and 4-1BBL is used to validate expression of the respective peptides in the engineered erythroid cells. Binding of an APC-labelled or PE-labelled anti-MHCI antibody is used to validate expression of the MHCI antigen presenting peptide in the engineered erythroid cells.

[1037] Functional activity of the effect of the engineered erythroid cells (gp350-HLA-A2-GPA, 4-1BBL) is assessed for their ability to stimulate the initial activation and proliferation of primary CD8+ T cells.

### Methods

[1038] Production of Lentiviral Vector

[1039] The genes for gp350-HLA-A2-GPA fusion protein and 4-1BBL are constructed. Genes encoding the proteins are cloned into the multiple cloning site of lentivirus vector pCDH with the MSCV promoter sequence from System Biosciences, such that one vector comprises the genes for both exogenous proteins. Lentivirus is produced in 293T cells by transfecting the cells with pPACKH1 (System Biosciences) and pCDH lentivirus vector containing genes for gp350-HLA-A2-GPA and 4-1BBL. Cells are placed in fresh culturing medium. The virus supernatant is collected 48 hours post-medium change by centrifugation at 1,500 rpm for 5 minutes. The supernatant is collected and frozen in aliquots at −80° C.

[1040] Transduction of Erythroid Precursor Cells

[1041] Expansion and differentiation of erythroid cells is performed according to Example 5, and transduced with the lentiviral vectors described above. Erythroid precursor cells are transduced during step 1 of the culture process. Erythroid cells in culturing medium are combined with lentiviral supernatant and polybrene. Infection is achieved by spinoculation, spinning the plate at 2000 rpm for 90 minutes at room temperature. After spinoculation, the cells are incubated at 37° C. overnight.

[1042] Antibody Binding

[1043] Binding of an APC-labelled or PE-labelled anti-gp350 antibody is used to validate expression of the gp350-HLA-A2-GPA fusion in the engineered erythroid cells. Binding of the antibody is measured by flow cytometry for APC fluorescence or PE fluorescence. A gate is set based on stained untransduced cells. Binding of an APC-labelled or PE-labelled anti-MHCI antibody is used to validate expression of the MHCI antigen presenting polypeptide in the engineered erythroid cells, as described in Example 5. Binding of an APC-labelled or PE-labelled anti-4-1BBL antibody (R&D Systems) is used to validate expression of 4-1BBL in in the engineered erythroid cells. Binding of any one of the antibodies is measured by flow cytometry for APC fluorescence or PE fluorescence. A gate is set based on stained untransduced cells.

[1044] Functional Validation Assays

[1045] The erythroid cells genetically engineered to co-express a gp350-HLA-A2-GPA fusion protein and a 4-1BBL costimulatory polypeptide are tested for their ability to stimulate the initial activation and proliferation of primary CD8+ T cells. The T cells are stimulated with the engineered erythroid cells, and the following parameters are evaluated: (1) rate of growth of the T cells stimulated with the aAPCs, as determined by a standard thymidine incorporation assay, which gives the total amount of DNA synthesized in a bulk culture; (2) induction of proliferation and cell division of CD4+ T cells; (3) viability of the CD8+ T cells stimulated by the various aAPCs during culture by fluorescent staining with annexin V and propidium iodide; (4) Bcl-xL and IL-2 expression, two genes involved in T cell survival and proliferation, respectively, using quantitative real time RT-PCR in order to determine the levels of steady-state mRNA coding for Bcl-xL and IL-2.

[1046] Cytokine Production

[1047] Cytokines are important effector molecules and provide insight into T cell differentiation. The ability of erythroid cells engineered to co-express a gp350-HLA-A2-GPA fusion and the costimulatory peptide 4-1BBL to induce certain cytokines from CD8 T cells is quantitated, for example IL-2 (a key T cell growth factor for ex vivo expansion and a cell's ability to induce IL-2 correlates well with its long term growth potential); IL-4 (a marker for TH2 differentiation); and IL-10 (an immunosuppressive cytokine that may be surrogate for T regulatory cell outgrowth). Other cytokines include, but are not limited to, TGF-β (for the same rationale as IL-10); IFN-γ (a marker for TH1 differentiation and an important effector cytokine); and TNFα (an important effector cytokine). Quantitation can be carried out using the ELISPOT (enzyme-linked immunospot) technique, that detects T cells that secrete a given cytokine (e.g., gamma interferon [IFN-γ]) in response to an antigenic stimulation. T cells are cultured with antigen-presenting cells in wells which have been coated with anti-IFN-γ antibodies. The secreted IFN-γ is captured by the coated antibody and then revealed with a second antibody coupled to a chromogenic substrate. Thus, locally secreted cytokine molecules form spots, with each spot corresponding to one IFN-γ-secreting cell. The number of spots allows one to determine the frequency of IFN-γ-secreting cells specific for a given antigen in the analyzed sample. The ELISPOT assay has also been described for the detection of tumor necrosis factor alpha, interleukin-4 (IL-4), IL-5, IL-6, IL-10, IL-12, granulocyte-macrophage colony-stimulating factor.

### Example 14. Activity of Enucleated Erythroid Cells Engineered to Co-Express an EBV-HLA-A2-GPA Fusion Protein and a Costimulatory Polypeptide in a Murine EBV Model In Vivo

[1048] Several EBV peptides have been shown to be a human leukemia antigen. Furthermore, several mouse systems have been used as disease models of EBV infection and associated diseases. The NOD/NSG EBV xenograft mouse model may be used to test an RTX-aAPC for EBV associated MS (as originally described in Fujiwara et al., 2013, Pathogens, March 14; 2(1):153-76, the entire contents of which are incorporated herein by reference) in order to test the system's ability to prohibit EBV activated autoreactive B cells. The NOD/NSG EBV xenograft model is set up using NOD/LtSz-scid IL-2rg−/−(NSG). At transplantation day, 2-5 days mice undergo 100 cGy irradiation and are transplanted intrahepatically with human CD34+ cells isolated from fetal liver or cord blood. EBV is inoculated intraperitoneally. Mice are then administered aAPC with either MHC class I or MHC class II molecules presenting EBV peptides and with a co-stimulatory molecule, (i.e. 4-1BBL). The aAPCs are either mouse RBCs clicked with the MHC molecules loaded with EBV peptide and co-stimulatory molecule, or alternatively human enucleated erythroid cells engineered to express an EBV peptide-MHC class I-GPA fusion protein and co-stimulatory molecule (e.g., the aAPC as described in Example 13). These aAPCs are expected to activate CD8 or CD4 T cells specific for the EBV peptides, which will in turn kill cells that are presenting EBV peptides through MHC class I or II. This could include depletion of B cells that have become lymphoproliferative. Animals are killed 4-10 weeks post-transfer, and EBV-specific T cell responses are analyzed using an IFN-γ ELISPOT assay as previously described (J Exp Med. 2009 Jun. 8; 206(6):1423-34, the contents of which are incorporated herein by reference). After aAPC administration, T cells are also stained for activation markers including, for example, CD62L, CD44, and/or 41BB, to evaluate phenotypes between mice with or without administration of aAPC.

### Example 15. Erythroid Cells Engineered to Present MHCI (Ovalbumin) and 4-1BBL Exhibit an In Vivo Dose Response Ova-Specific T Cells In Vivo

[1049] Murine erythroid cells were conjugated with MHCI presenting ovalbumin peptide and 4-1BBL using the click methodology (click chemistry for functionalizing erythroid cells is described in International Application No. PCT/US2018/000042, which claims priority to U.S. Provisional Application No. 62/460,589, filed Feb. 17, 2017 and U.S. Provisional Application No. 62/542,142, filed Jul. 8, 2017, incorporated by reference in their entireties herein). Briefly, mouse peripheral blood was filtered through a PAL de-leukocyte filter and labeled with 0.04 mM 6′ Azido-NHS-ester in pH8 PBS for 30 min at room temperature. Azido-labeled mRCT were incubated with 40 uM m4-1BBL-DBCO-Thiolinker and the H-2Kb SIINFEKL-DBCO-Thiolinker (SEQ ID NO: 721) monomer at room temperature for 1h and further incubated at 4 C overnight.

[1050] CD8+ T cells were purified from secondary lymphoid organs of OT1 transgenic mice using negative selection kit from Miltenyi and labeled with fluorescent dye (10 uM CFSE). 2E6 OT1 cells were injected intravenously into C57BL/6 mice on day 0. On day 0, 4 hours after OT1 injection, mice were injected intravenously with 1E6, 1E7 or 1E8 aAPC (mRCT-4-1BBL H2Kb OVA). On day 4, mice were sacrificed and single cell suspensions from their spleen and lymph nodes were stained with PE cy7 CD44, APC CD122, ad BV650 CD27, and analyzed by flow cytometry. Activation and Proliferation of OT1 T cells was monitored by following dilution of fluorescent dye signal in lymph nodes or spleen.

[1051] As shown in FIG. 5, murine erythroid cells presenting MHC I (ovalbumin) (mRCT-aAPC (ova) 4-1BBL), potently induce the activation and proliferation of ova-specific T cells in a dose dependent fashion in vivo, as evidenced by increased CFSE fluorescence intensity (FIG. 5A) and CD44 expression (FIG. 5B). The results also show that the OT1 T cells that were activated display a memory phenotype, as evidenced by the upregulation of key memory markers, CD122 and CD27 (FIGS. 5C and 5D), in vivo. These results demonstrate the ability to potently and selectively expand and activate antigen-specific T cells using the engineered enucleated cells as described herein.

### Example 16. A Second Dose of the Erythroid Cells Engineered to Present MHCI (Ovalbumin) and 4-1BBL Dramatically Boosts CD8+OT1 T-Cells in Both Lymph Node and Spleen

[1052] Murine erythroid cells were generated as described in Example 15. CD8+ T cells were purified from secondary lymphoid organs of OT1 transgenic mice as described in Example 15. Briefly, mice were injected intravenously with 1E9 aAPC (mRCT-4-1BBL or mRCT-4-1BBL H2Kb OVA) at day 0 and day 3. On day 6, mice were sacrificed and single cell suspensions from their spleen and lymph nodes were stained with NIR Zombie, FITC CD44, BV650 CD8 and BV785 CD62L and analyzed by flow cytometry.

[1053] Proliferation of OT1 T cells was monitored by following dilution of fluorescent dye signal in lymph nodes or spleen. The SIINFEKL peptide (SEQ ID NO: 721) (10 μg) and adjuvant LPS (50 ng), diluted in PBS, were administered as positive controls to induce proliferation of OT-1 T cells. The results of the experiment are represented in FIG. 6, showing that a second dose of the mRCT-4-1BBL OVA on day 3 dramatically increases cell counts of the OT1-T cells, relative to a second dose of LPS and peptide on day 3. Administration of a second aAPC dose at this time drove >200-fold expansion of OT1 cells with a memory-like phenotype in the peripheral blood and secondary lymphoid organs. In contrast, a second dose of the mRCT-4-1BBL OVA on day 7 did not dramatically increase cell counts of the OT1-T cells (data not shown). It is observed that the T-cell counts are at their peak during 3-4 days after the initial administration of the RCTs. Accordingly, while not wishing to be bound by theory, it is believed that administration of a second dose during the peak of the initial OT-1 T-cell counts (between days 3 to 4), would be the most effective to induce a dramatic change in the T-cell counts.

### Example 17. Erythroid Cells Engineered to Present MHCI (Gp100) and 4-1BBL Activate Gp100-Specific T Cells In Vitro

[1054] Murine erythroid cells were conjugated with MHCI presenting tumor peptide gp100 and 4-1BBL using the click methodology (click chemistry for functionalizing erythroid cells is described in International Application No. PCT/US2018/000042, which claims priority to U.S. Provisional Application No. 62/460,589, filed Feb. 17, 2017 and U.S. Provisional Application No. 62/542,142, filed Jul. 8, 2017, incorporated by reference in their entireties herein). Briefly, mouse peripheral blood was filtered through a PAL de-leukocyte filter and labeled with 0.04 mM 6′ Azido-NHS-ester in pH8 PBS for 30 min at room temperature. Azido-labeled mRCT were incubated with 40 uM m4-1BBL-DBCO-Thiolinker at room temperature for 1h and further incubated at 4 C overnight. mRCT-m4-1BBL were clicked with biotin by incubating with 1 uM water soluble DBCO biotin at room temperature for 1h, followed by incubating with neutravidin at a 1:1 molar ratio of biotin and neutravidin. Neutravidin bound cells were then incubated with biotinylated H-2Db gp100 (KVPRNQDWL (SEQ ID NO: 722)) monomer at a 1:1 molar ratio of biotin and monomer for 1h at room temperature.

[1055] Pmel-1 cells, a transgenic CD8+ T cell population against gp100, were purified from secondary lymphoid organs mice using a negative selection kit from Miltenyi and labeled with 1 uM CFSE. 2E5 CFSE labeled primary CD8+ T cells were plated into each well of a 96 well plate. Varying amounts (3E6, 1E6, 3.3E5, or 1.1E5 cells) of mRCT, mRCT-4-1BBL, mRCT-gp100-H2Db, or mRCT-gp100-H2Db+4-1BBL were plated in cRPMI media into the wells containing CD8+ T cells at mRCT:T cell ratios of 10:1, 3.3:1, 1.1:1, and 0.37:1 (left to right in FIG. 7) and incubated for two days at 37 C. Cells were washed and stained with anti-CD8, livedead dye to quantify T cell expansion and activation.

[1056] As shown in FIG. 7, murine erythroid cells presenting MHC I (gp100) and 4-1BBL on the cell surface, potently activate gp100-specific T cells in vitro, relative to murine erythroid cells presenting MHC I (gp100) alone. These results demonstrate the ability to potently and selectively expand another type of antigen-specific T cell compared to OVA specific T cells, using the engineered enucleated cells as described herein.

### Example 18. Generation of Different Versions of HLA-A2 (HPV E7) Expressed on RCTs

[1057] DNA constructs of three different versions of HLA-A2 (HLA-A2 wild type, HLA-A2 Y84A, and HLA-A2 Y84C+L2C) were used for expressing HPV P1 (HPV16 E7 11-20), as described in FIG. 8A and also HPV P1-2 (HPV16 E7 11-19). The sequences of these constructs are described below. See, e.g., Hansen et al., 2010, Trends Immunol. 31(10): 363-369.

HLA-A2v1 (wild type):
(SEQ ID NO: 723)
MSRSVALAVLALLSLSGLEAYMLDLQPETTGGGGSGGGGSGGGGSIQRTPKIQVYSRHP
AENGKSNFLNCYVSGFHPSDIEVDLLKNGERIEKVEHSDLSFSKDWSFYLLYYTEFTPTE
KDEYACRVNHVTLSQPKIVKWDRDMGGGGSGGGGSGGGGSGGGGSGSHSMRYFFTSV
SRPGRGEPRFIAVGYVDDTQFVRFDSDAASQRMEPRAPWIEQEGPEYWDGETRKVKAH
SQTHRVDLGTLRGYYNQSEAGSHTVQRMYGCDVGSDWRFLRGYHQYAYDGKDYIAL
KEDLRSWTAADMAAQTTKHKWEAAHVAEQLRAYLEGTCVEWLRRYLENGKETLQRT
DAPKTHMTHHAVSDHEATLRCWALSFYPAEITLTWQRDGEDQTQDTELVETRPAGDGT
FQKWAAVVVPSGQEQRYTCHVQHEGLPKPLTLRWEPSSQPTIPIGSGSGSGSEDGSGSGS
GSLSTTEVAMHTSTSSSVTKSYISSQTNDTHKRDTYAATPRAHEVSEISVRTVYPPEEETG
ERVQLAHHFSEPEITLIIFGVMAGVIGTILLISYGIRRLIKKSPSDVKPLPSPDTDVPLSSVEI
ENPETSDQ*
HLA-A2v2 (Y84A):
(SEQ ID NO: 724)
MSRSVALAVLALLSLSGLEAYMLDLQPETTGGGGSGGGGSGGGGSIQRTPKIQVYSRHP
AENGKSNFLNCYVSGFHPSDIEVDLLKNGERIEKVEHSDLSFSKDWSFYLLYYTEFTPTE
KDEYACRVNHVTLSQPKIVKWDRDMGGGGSGGGGSGGGGSGGGGSGSHSMRYFFTSV
SRPGRGEPRFIAVGYVDDTQFVRFDSDAASQRMEPRAPWIEQEGPEYWDGETRKVKAH
SQTHRVDLGTLRGAYNQSEAGSHTVQRMYGCDVGSDWRFLRGYHQYAYDGKDYIAL
KEDLRSWTAADMAAQTTKHKWEAAHVAEQLRAYLEGTCVEWLRRYLENGKETLQRT
DAPKTHMTHHAVSDHEATLRCWALSFYPAEITLTWQRDGEDQTQDTELVETRPAGDGT
FQKWAAVVVPSGQEQRYTCHVQHEGLPKPLTLRWEPSSQPTIPIGSGSGSGSEDGSGSGS
GSLSTTEVAMHTSTSSSVTKSYISSQTNDTHKRDTYAATPRAHEVSEISVRTVYPPEEETG
ERVQLAHHFSEPEITLIIFGVMAGVIGTILLISYGIRRLIKKSPSDVKPLPSPDTDVPLSSVEI
ENPETSDQ*
HLA-A2v3 (Y84C and L2C):
(SEQ ID NO: 725)
MSRSVALAVLALLSLSGLEAYMLDLQPETTGCGGSGGGGSGGGGSIQRTPKIQVYSRHP
AENGKSNFLNCYVSGFHPSDIEVDLLKNGERIEKVEHSDLSFSKDWSFYLLYYTEFTPTE
KDEYACRVNHVTLSQPKIVKWDRDMGGGGSGGGGSGGGGSGGGGSGSHSMRYFFTSV
SRPGRGEPRFIAVGYVDDTQFVRFDSDAASQRMEPRAPWIEQEGPEYWDGETRKVKAH
SQTHRVDLGTLRGCYNQSEAGSHTVQRMYGCDVGSDWRFLRGYHQYAYDGKDYIAL
KEDLRSWTAADMAAQTTKHKWEAAHVAEQLRAYLEGTCVEWLRRYLENGKETLQRT
DAPKTHMTHHAVSDHEATLRCWALSFYPAEITLTWQRDGEDQTQDTELVETRPAGDGT
FQKWAAVVVPSGQEQRYTCHVQHEGLPKPLTLRWEPSSQPTIPIGSGSGSGSEDGSGSGS
GSLSTTEVAMHTSTSSSVTKSYISSQTNDTHKRDTYAATPRAHEVSEISVRTVYPPEEETG
ERVQLAHHFSEPEITLIIFGVMAGVIGTILLISYGIRRLIKKSPSDVKPLPSPDTDVPLSSVEI
ENPETSDQ*
These 3 versions of HLA-A2 were used to express the single chain
variant HPV P1-2-HLA-A2-GPA:
(SEQ ID NO: 726)
MSRSVALAVLALLSLSGLEAYMLDLQPETGGGGSGGGGSGGGGSIQRTPKIQVYSRHPA
ENGKSNFLNCYVSGFHPSDIEVDLLKNGERIEKVEHSDLSFSKDWSFYLLYYTEFTPTEK
DEYACRVNHVTLSQPKIVKWDRDMGGGGSGGGGSGGGGSGGGGSGSHSMRYFFTSVS
RPGRGEPRFIAVGYVDDTQFVRFDSDAASQRMEPRAPWIEQEGPEYWDGETRKVKAHS
QTHRVDLGTLRGYYNQSEAGSHTVQRMYGCDVGSDWRFLRGYHQYAYDGKDYIALK
EDLRSWTAADMAAQTTKHKWEAAHVAEQLRAYLEGTCVEWLRRYLENGKETLQRTD
APKTHMTHHAVSDHEATLRCWALSFYPAEITLTWQRDGEDQTQDTELVETRPAGDGTF
QKWAAVVVPSGQEQRYTCHVQHEGLPKPLTLRWEPSSQPTIPIGSGSGSGSEDGSGSGS
GSLSTTEVAMHTSTSSSVTKSYISSQTNDTHKRDTYAATPRAHEVSEISVRTVYPPEEETG
ERVQLAHHFSEPEITLIIFGVMAGVIGTILLISYGIRRLIKKSPSDVKPLPSPDTDVPLSSVEI
ENPETSDQ

[1058] Production of Lentiviral Vector

[1059] The genes for HPV P1-HLA-A2-GPA fusion protein and 4-1BBL were constructed. Genes encoding the proteins were cloned into the multiple cloning site of lentivirus vector pCDH with the MSCV promoter sequence from System Biosciences, such that one vector comprised the genes for both exogenous proteins. Lentivirus was produced in 293T cells by transfecting the cells with pPACKH1 (System Biosciences) and pCDH lentivirus vector containing genes for HPV P1-HLA-A2-GPA and 4-1BBL. Alternately separate vectors containing genes for HPV P1-HLA-A2-GPA and 4-1BBL can be utilized. Cells were placed in fresh culturing medium. The virus supernatant was collected 48 hours post-medium change by centrifugation at 1,500 rpm for 5 minutes. The supernatant was collected and frozen in aliquots at −80° C.

### Transduction of Erythroid Precursor Cells

[1060] Expansion and differentiation of erythroid cells was performed according to Example 5, with the lentiviral vectors described above. Erythroid precursor cells were transduced during step 1 of the culture process. Erythroid cells in culturing medium were combined with lentiviral supernatant and polybrene. Infection was achieved by spinoculation, spinning the plate at 2000 rpm for 90 minutes at room temperature. After spinoculation, the cells were incubated at 37° C. overnight

[1061] Antibody Binding

[1062] Binding of an APC-labelled or PE-labelled anti-beta 2 microglobulin antibody was used to validate expression of the HPV P1-HLA-A2-GPA fusion in the engineered erythroid cells, as described in Example 5. Binding of an APC-labelled or PE-labelled anti-MHCI antibody was used to validate expression of the MHCI antigen presenting polypeptide in the engineered erythroid cells, also as described in Example 5. Binding of an APC-labelled or PE-labelled anti-4-1BBL antibody (R&D Systems) was used to validate expression of 4-1BBL in the engineered erythroid cells. Binding of any one of the antibodies was measured by flow cytometry for APC fluorescence or PE fluorescence. A gate was set based on stained untransduced cells.

### Example 19: Activity of HLA-A2 (HPV E7) Expressed on RCTs in Stimulating HPV-Specific T Cells In Vitro

[1063] Human RCTs expressing 4-1BBL, HLA-A2 HPV P1, or both 4-1BBL and HLA-A2 HPV P1 were prepared essentially as described in Example 18. These RCTs co-expressing a HPV P1-HLA-A2-GPA fusion protein and a 4-1BBL costimulatory polypeptide were tested for their ability to stimulate the initial activation and proliferation of primary CD8+ T cells, essentially as described in Example 6. T2 cells pulsed with the CMV or HPV peptide were utilized as positive controls.

[1064] Primary human CD8+ cells were purchased from Astarte Biologics. Varying amounts human RCTs, were plated in cRPMI media into the wells containing 4E4 or 2E4 CD8+ T cells at RCT:T cell ratios of 10:1, 2:1 and 0.4:1, (left to right, for each RCT, in FIGS. 8B and 8C) and incubated for two days at 37 C.

[1065] Intracellular staining was utilized to measure cellular levels of Nur77 and IFN-γ. Briefly, the cells were fixed with 200 μL of IC Fixation Buffer and incubated 20-60 minutes in dark, at room temperature. Samples were centrifuged at 400-600×g at room temperature for 5 minutes. The supernatant was discarded and 200 μL of permeabilization buffer was added. Samples were centrifuged at 400-600×g at room temperature for 5 minutes. The supernatant was discarded and the pellet was resuspended in about 100 μL with 1× permeabilization buffer. Without washing, directly conjugated antibody (anti-Nur77 PE and anti-IFN-γ APC) was added followed by incubation for at least 30 minutes in dark, at room temperature. Nur77 and IFN-γ were analyzed at 2, 6 and 24 hours after incubation of the RCTs with the primary CD8+ T-cells.

[1066] Flow cytometry analysis suggested that all the tested versions of HLA-A2 (HPV E7) were well-expressed on the surface of human RCTs (data not shown). Furthermore, all three versions lead to the activation of HPV E7 specific T cells, as determined by Nur77 expression (FIG. 8B), and IFNγ secretion (FIG. 8C). These results demonstrate the ability to potently and selectively activate an antigen-specific T cell, for example HPV specific T cells, using the engineered enucleated cells as described herein.

### Example 20. Ovalbumin-Specific T Cells Expanded and Activated by Erythroid Cells Presenting MHCI (Ovalbumin) and 4-1BBL Reduce Tumor Volume

[1067] Murine erythroid cells were conjugated with MHCI presenting ovalbumin peptide and 4-1BBL using the click methodology, as described in Example 15. Briefly, mouse peripheral blood was filtered through a PAL de-leukocyte filter and labeled with 0.04 mM 6′ Azido-NHS-ester in pH8 PBS for 30 min at room temperature. Azido-labeled mRCT were incubated with 40 μM m4-1BBL-DBCO-Thiolinker and 40 μM H-2Kb SIINFEKL-DBCO-Thiolinker monomer (SEQ ID NO: 721) at room temperature for 1h and then further incubated at 4° C. overnight.

[1068] CD8+ T cells were purified from secondary lymphoid organs of OT1 transgenic mice using negative selection kit from Miltenyi and labeled with 10 uM Cell-Trace Violet. 2×10⁶ tumor cells expressing ovalbumin (EG7.OVA) were injected subcutaneously (s.c.) into B6 Cd45.1 mice 7 days before dosing. Experimental groups of mice (7 per group) were as follows:
[1069] (1) OT1 dose: 2×10⁶ OT1 (i.v.); cell dose: 1×10⁹ murine RCT (mRCT) (i.v.);
[1070] (2) OT1 dose: 2×10⁶ OT1 (i.v.); cell dose: 1×10⁹ murine RCT presenting MHCI (ovalbumin) and 4-1BBL (mRCT-OVA-4-1BBL) (i.v.).

[1071] The first day of dosing with OT1 and mRCTs was determined based on tumor volume. At day 0, tumors were randomized on tumor volumes of 60-193 mm³, with an average volume of 141 mm³. Adoptive T cell transfer of OT1 at the doses set out in groups (1) and (2) above was carried out by intravenous injection into wild type mice (day 1). Mice were then dosed with 1×10⁹ mRCT or mRCT-OVA-41-BBL as set out in groups (1) and (2) above, at days 1, 4, and 8. Significant OT1 proliferation was observed 3-4 days post-dosing as measured by CTV dilution. The second dose was given at 4 days after the first dose, corresponding to the time of maximum OT1 cell expansion. Tumor volume was measured over days 1-14, and mice were euthanized once tumor volumes reached greater than 2000 mm³.

[1072] The results of this experiment are shown in FIGS. 9-11. FIG. 9 shows the change in average tumor volume (mm³) over time after tumor randomization, where dosing was carried out at days 1, 4 and 8. FIG. 10 shows the individual tumor volume (mm³) over time after tumor randomization, where dosing was carried out at days 1, 4 and 8. The results in FIG. 9 and FIG. 10 show that mRCT-OVA-4-1BBL were able to activate tumor specific T cells (OT1) at a dose of 2×10⁶, as shown by a reduction of EG7.OVA tumor volume over time as compared to mRCTs. Administration of aAPC mRCT-OVA-4-1BBL to mice bearing EG7.OVA tumors caused 60% tumor growth inhibition by Day 7 after dosing compared to controls, which corresponded with the increased expansion of the OT1s (FIG. 9). FIG. 11 is a graph showing percent survival of mice over time. As shown in FIG. 11, 7 out of 7 mice dosed with mRCT-OVA-4-1BBL survived by day 14 post-randomization, while only 4 out of 7 mice dosed with mRCT survived by day 14 post-randomization. In addition, in a separate, similar experiment it was observed that all aAPC dosed mice demonstrated increased OT1 infiltration into EG7.OVA tumors with some tumors additionally demonstrating endogenous OVA specific T cell infiltration (data not shown).

[1073] This experiment was repeated, generally as described above, except that adoptive T cell transfer of OT1 was carried out at a dose of 5×10⁵ OT1 (i.v.), and in addition to a group of mice dosed with mRCT-OVA-4-1BBL, the following additional control groups were included (12 mice per group): phosphate buffered saline (PBS), SIINFEKL peptide (SEQ ID NO: 721) and Lipopolysaccharide (LPS), mRCT-OVA, and mRCT-4-1BBL. In this experiment, 2×10⁶ tumor cells expressing ovalbumin (EG7.OVA) were injected subcutaneously (s.c.) into wild type mice at day −9, tumor randomization was on day 0 when the tumor volume was between 52-130 mm³, and at an average of 97 mm³, OT1 dosing was on day 1, and mRCT dosing was on days 1, 5 and 9.

[1074] The results from these experiments (data not shown) demonstrated that, similar to the first experiment, mRCT-OVA-4-1BBL activated tumor specific T cells (OT1), as evidenced by a reduction of EG7.OVA tumor volume over time as compared to that of the control mRCTs, PBS and peptide+LPS. No significant differences were observed among these controls. Further, no reduction in tumor volume was observed for mRCT-OVA and mRCT-4-1BBL as compared to that of the control mRCT. These results indicate that the combination of OVA and 4-1BBL on the mRCT were necessary for the observed tumor control.

### Example 21. Generation of Erythroid Cells Presenting MHCI (Ovalbumin), 4-1BBL and IL-15 (OVA-H2Kb+4-1BBL+IL15)

[1075] Murine erythroid cells were conjugated with each of MHCI presenting ovalbumin peptide (OVA-H2Kb), 4-1BBL and IL-15 using a modification of the click methodology (click chemistry for functionalizing erythroid cells is described in International Application No. PCT/US2018/000042, which claims priority to U.S. Provisional Application No. 62/460,589, filed Feb. 17, 2017 and U.S. Provisional Application No. 62/542,142, filed Jul. 8, 2017, incorporated by reference in their entireties herein). Here, conjugation of three peptides onto the murine erythroid cells was achieved using two different handles, dibenzocyclooctyne Group (DBCO) and trans-cyclooctene (TCO). Triple click cells were produced with the following reagents: Fc-hIL15TP (TCO labeled); Fc-hIL-15TP (DBCO labeled); m4-1BBL (DBCO thiolinker) and OVA-H2Kb (DBCO thiolinker). Briefly, the reactions were performed as follows:

[1076] OVA-4-1BBL-IL15 (MTZ-TCO)

[1077] Mouse peripheral blood was filtered through a PAL de-leukocyte filter and 1×10⁸ mRCT were labeled with 0.04 mM 6′ Azido-NHS-ester and 0.04 mM methyltetrazine-PEG-NHS-ester (MTZ) in pH8 PBS for 30 min at room temperature. 5 ul of 20 μM Fc-hIL-15TP (TCO labeled) and 5 ul of 50 μM OVA-H2Kb-DBCO-thiolinker were added and incubated for 1 hr at room temp. 5 ul of 50 μM m4-1BBL-DBCO-thiolinker was added to the cells and the mixture was incubated overnight at 4° C.

[1078] OVA-4-1BBL-IL15 (AZ-DBCO)

[1079] Mouse peripheral blood was filtered through a PAL de-leukocyte filter and 1×10⁸ mRCT were labeled with 0.04 mM 6′ Azido-NHS-ester in pH8 PBS for 30 min at room temperature. Azido-labeled mRCT were incubated with 5 ul of 20 μM Fc-hIL-15TP-DBCO and 5 ul of 50 μM OVA-H2Kb-DBCO-thiolinker for 1 hr at room temp. 5 ul of 50 μM m4-1BBL-DBCO-thiolinker was added to the cells and the mixture was incubated overnight at 4° C.

[1080] OVA-4-1BBL

[1081] Mouse peripheral blood was filtered through a PAL de-leukocyte filter and 1×10⁸ mRCT were labeled with 0.04 mM 6′ Azido-NHS-ester in pH8 PBS for 30 min at room temperature. Azido-labeled mRCT were incubated with 5 ul of 50 μM m4-1BBL-DBCO-thiolinker and 5 ul of 50 μM OVA-H2Kb-DBCO-thiolinker and the mixture was incubated overnight at 4° C.

[1082] Copy number of IL15, OVA and 4-1BBL was determined for the mRCTs triple clicked with OVA-4-1BBL-IL15 (MTZ-TCO) or OVA-4-1BBL-IL15 (AZ-DBCO), and mRCTs double clicked with OVA-4-1BBL. While the copy number for each of OVA and 4-1BBL was similar among the three groups, mRCTs triple clicked with OVA-4-1BBL-IL15 (MTZ-TCO) showed considerably higher IL15 copy number as compared to mRCTs triple clicked with OVA-4-1BBL-IL15 (AZ-DBCO) (see Table 27 below).

TABLE 27
Copy Number

| | IL15 | OVA | 4-1BBL |
|---|---|---|---|
| Group | copy # | copy # | copy # |
| OVA-4-1BBL-IL15 | 370,231 | 7,270 | 128,194 |
| (MTZ-TCO) | | | |
| OVA-4-1BBL-IL15 | 31,544 | 10,345 | 118,819 |
| (AZ-DBCO) | | | |
| OVA-4-1BBL | — | 29,958 | 144,952 |

[1083] While not wishing to be bound by theory, it is believed that mRCTs triple clicked with the alternative click handle (MTZ-TCO) bypassed potential competition with DBCO to achieve the higher copy number of IL-15.

### Example 22: Erythroid Cells Presenting MHCI (Ovalbumin), 4-1BBL and IL-15 (OVA-H2Kb+4-1BBL+IL15) Show Increased OT1 CD8+ T Cell Proliferation Over Cells Presenting MHCI (Ovalbumin) and 4-1BBL (OVA-H2Kb+4-1BBL)

[1084] Murine RCTs were prepared as described in Example 20. CD8+ T cells were purified from the spleen of OT1 transgenic mice using a negative selection kit from Miltenyi and labeled with 10 uM CFSE. 2E5 CFSE labeled OT1 CD8+ T cells were plated into each well of a 96 well plate. Unclicked mRCTs, triple clicked mRCTs (OVA-4-1BBL-IL15 (MTZ-TCO) and OVA-4-1BBL-IL15 (AZ-DBCO)), or double clicked mRCTs (OVA-4-1BBL, and OVA-4-1BBL+ soluble IL-15 (20 ng/ml) and OT1 CD8+ T cells were co-incubated at ratios of 25:1, 10:1, and 4:1 (mRCT:OT1) and incubated for 4 days at 37 C and 5% CO₂. On day 4, cells were stained with Pacific blue CD44 and BV785 CD62L and analyzed by flow cytometry. CD44 was used as a marker of CD8+ T cell proliferation. The results of this experiment are shown in FIG. 12. The results demonstrated that mRCTs triple clicked with OVA-4-1BBL-IL15 (MTZ-TCO) drove increased OT1 CD8+ T cell proliferation by Day 4 as compared to mRCT-OVA-4-1BBL (double clicked), and that the mRCTs triple clicked with OVA-4-1BBL-IL15 (MTZ-TCO) drove similar OT1 CD8+ T cell proliferation by Day 4 as mRCT OVA-4-1BBL (double clicked) in combination with soluble IL15. As shown in FIG. 12, second panel from left, mRCTs triple clicked with the alternative click handle (MTZ-DBCO) also drove OT1 CD8+ T cell proliferation by Day 4.

[1085] OT1 CD8+ T cell proliferation at day 4 was also determined. The results, as shown in FIG. 13, demonstrate that mRCTs triple clicked with OVA-4-1BBL-IL15 (MTZ-TCO) stimulated substantial OT1 CD8+ T cell proliferation, and to a similar level as that achieved with the combination of mRCT OVA-4-1BBL (double clicked) and soluble IL-15. Further, mRCTs triple clicked with OVA+4-1BBL+IL15 (MTZ-TCO) increased proliferation of OT1 CD8+ T cells to a greater level than mRCTs triple clicked with the DBCO handle, OVA-H2Kb+4-1BBL (AZ-DBCO). As shown above in Table 27, mRCTs triple clicked with OVA-4-1BBL-IL15 (MTZ-TCO) showed a higher IL15 copy number as compared to mRCTs triple clicked with OVA-4-1BBL-IL15 (AZ-DBCO), indicating that here, the observed increased proliferation of OT1 CD8+ T cells was due, at least in part, to increased IL15 copy number. In addition, the percentages of effector T cell and memory T cell in the OT1 CD8+ T cell populations were determined. It was found that the percent of CD8+ T cells that were effector or memory T cells did not differ significantly among the double clicked mRCTs and triple clicked mRCTs groups (data not shown).

[1086] In summary, the results from this experiment show that a combination of signals 1, 2 and 3 on RBCs, specifically a combination of OVA, 4-1BBL and IL-15, promotes greater CD8+ T cell proliferation than signals 1 and 2, i.e., OVA and 4-1BBL, alone.

### Example 23. Generation of Erythroid Cells Presenting MHCI (Ovalbumin), 4-1BBL and IL-12 (OVA-H2Kb+4-1BBL+IL12)

[1087] Murine erythroid cells were conjugated with each of MHCI presenting ovalbumin peptide (OVA-H2Kb), 4-1BBL and IL-12 using a modification of the click methodology (click chemistry for functionalizing erythroid cells is described in International Application No. PCT/US2018/000042, which claims priority to U.S. Provisional Application No. 62/460,589, filed Feb. 17, 2017 and U.S. Provisional Application No. 62/542,142, filed Jul. 8, 2017, incorporated by reference in their entireties herein). Triple click cells were produced with the following reagents: Fc-mIL12Fc (TCO-PEG4-NHS Ester labeled); m4-1BBL (DBCO thiolinker) and OVA-H2Kb (DBCO thiolinker). Briefly, the reactions were performed as follows:

[1088] OVA-4-1BBL-IL12 (MTZ-TCO)

[1089] Mouse peripheral blood was filtered through a PAL de-leukocyte filter and 1×10⁸ mRCT were labeled with 0.04 mM 6′ Azido-NHS-ester and 0.02 mM methyltetrazine-PEG-NHS-ester (MTZ) in pH 9 PBS for 30 min at room temperature. 5 ul of 20 μM Fc-mIL12Fc-TCO-PEG4-NHS Ester and 5 ul of 50 μM OVA-H2Kb-DBCO-thiolinker were added and incubated for 1 hr at room temp. 5 ul of 50 μM m4-1BBL-DBCO-thiolinker was added to the cells and the mixture was incubated overnight at 4° C.

[1090] OVA-4-1BBL

[1091] Mouse peripheral blood was filtered through a PAL de-leukocyte filter and 1×10⁸ mRCT were labeled with 0.04 mM 6′ Azido-NHS-ester and 0.02 mM methyltetrazine-PEG-NHS-ester (MTZ) in pH 9 PBS for 30 min at room temperature. Azido-labeled mRCT were incubated with 5 ul of 50 μM m4-1BBL-DBCO-thiolinker and 5 ul of 50 μM OVA-H2Kb-DBCO-thiolinker and the mixture was incubated overnight at 4° C.

[1092] Copy number of IL12, OVA and 4-1BBL was determined for the mRCTs triple clicked with OVA-4-1BBL-IL12, and mRCTs double clicked with OVA-4-1BBL. (see Table 28 below).

TABLE 28
Copy Number

| | IL12 | OVA | 4-1BBL |
|---|---|---|---|
| Group | copy # | copy # | copy # |
| OVA-4-1BBL-IL12 | 90,277 | 12,451 | 72,579 |
| OVA-4-1BBL | — | 26,397 | 105,807 |

### Example 24. Generation of Erythroid Cells Presenting MHCI (Ovalbumin), 4-1BBL and IL-7 (OVA-H2Kb+4-1BBL+IL7)

[1093] Murine erythroid cells were conjugated with each of MHCI presenting ovalbumin peptide (OVA-H2Kb), 4-1BBL and IL-7 using a modification of the click methodology (click chemistry for functionalizing erythroid cells is described in International Application No. PCT/US2018/000042, which claims priority to U.S. Provisional Application No. 62/460,589, filed Feb. 17, 2017 and U.S. Provisional Application No. 62/542,142, filed Jul. 8, 2017, incorporated by reference in their entireties herein). Triple click cells were produced with the following reagents: Fc-mIL-7 (DBCO-Sulfo-NHS ester labeled); m4-1BBL (DBCO thiolinker) and OVA-H2Kb (DBCO thiolinker). Briefly, the reactions were performed as follows:

[1094] OVA-4-1BBL-IL7 (AZ-DBCO)

[1095] Mouse peripheral blood was filtered through a PAL de-leukocyte filter and 1×10⁸ mRCT were labeled with 0.04 mM 6′ Azido-NHS-ester and 0.02 mM methyltetrazine-PEG-NHS-ester (MTZ) in pH 9 PBS for 30 min at room temperature. Azido-labeled mRCT were incubated with 5 ul of 20 μM Fc-mIL-7-DBCO-Sulfo-NHS ester and 5 ul of 50 μM OVA-H2Kb-DBCO-thiolinker for 1 hr at room temp. 5 ul of 50 μM m4-1BBL-DBCO-thiolinker was added to the cells and the mixture was incubated overnight at 4° C.

[1096] OVA-4-1BBL

[1097] Mouse peripheral blood was filtered through a PAL de-leukocyte filter and 1×10⁸ mRCT were labeled with 0.04 mM 6′ Azido-NHS-ester and 0.02 mM methyltetrazine-PEG-NHS-ester (MTZ) in pH 9 PBS for 30 min at room temperature. Azido-labeled mRCT were incubated with 5 ul of 50 μM m4-1BBL-DBCO-thiolinker and 5 ul of 50 μM OVA-H2Kb-DBCO-thiolinker and the mixture was incubated overnight at 4° C.

[1098] Copy number of IL7, OVA and 4-1BBL was determined for the mRCTs triple clicked with OVA-4-1BBL-IL7, and mRCTs double clicked with OVA-4-1BBL. (see Table 29 below).

TABLE 29
Copy Number

| | | OVA | 4-1BBL |
|---|---|---|---|
| Group | IL7 copy # | copy # | copy # |
| OVA-4-1BBL-IL7 | 75,170 | 10,660 | 75,106 |
| OVA-4-1BBL | — | 26,397 | 105,807 |

### Example 25: Erythroid Cells Presenting MHCI (Ovalbumin) and 4-1BBL with IL-7 (OVA-H2Kb+4-1BBL+IL7), IL-12 (OVA-H2Kb+4-1BBL+IL12), or IL-15 (OVA-H2Kb+4-1BBL+IL15), Show Increased OT1 CD8+ T Cell Proliferation Over Cells Presenting 4-1BBL (OVA-H2Kb+41-BB1)

[1099] Murine RCTs were prepared, for example as described in Examples 21, 23 and 24. CD8+ T cells were purified from the spleen and lymph nodes of OT1 transgenic mice using a negative selection kit from Miltenyi and labeled with 1 uM cell trace violet. 2E5 cell trace violet labeled OT1 CD8+ T cells were plated into each well of a 96 well plate. Unclicked mRCTs or triple clicked mRCTs (OVA-4-1BBL-IL7, OVA-4-1BBL-IL12, or OVA-4-1BBL-IL15), and OT1 CD8+ T cells were co-incubated at ratios of 1:1.1, 1:3.3, and 1:10 (mRCT:OT1) and incubated for 4 days at 37 C and 5% CO₂. On day 4, proliferation, activation and memory markers of OT1 T cells were analyzed by multi-color flow cytometry. Cells were stained with FITC CD44, APC CD122, and BV785 CD62L. The results of this experiment are shown in FIG. 14. The results demonstrated that the mRCTs triple clicked with OVA-4-1BBL-IL7, OVA-4-1BBL-IL12, or OVA-4-1BBL-IL15 drove increased OT1 CD8+ T cell proliferation by Day 4 as mRCT OVA-4-1BBL (double clicked) (FIG. 14A). In addition, the percentages of memory stem T cells (Tscm), central memory T cells (Tcm) and effector memory T cells (Tem) phenotypes, in the OT1 CD8+ T cell populations, were determined. It was found that the mRCTs triple clicked with OVA-4-1BBL-IL7, OVA-4-1BBL-IL12, or OVA-4-1BBL-IL15 drove increased activation of a Tcm phenotype, whereas mRCTs double clicked with mRCT OVA-4-1BBL drove nearly equal Tem and Tcm phenotypes (FIG. 14B).

[1100] In summary, the results from this experiment show that a combination of signals 1, 2 and 3 on RBCs, specifically a combination of OVA-4-1BBL-IL7, OVA-4-1BBL-IL12, or OVA-4-1BBL-IL15, promotes greater CD8+ T cell proliferation than signals 1 and 2, i.e., OVA and 4-1BBL, alone.

### Example 26: Mice Treated with Erythroid Cells Presenting MHCI (Ovalbumin) and 4-1BBL Demonstrate EG7.OVA Tumor Control Even Upon being Re-Challenged with EG7.OVA Tumor Cells

[1101] Murine erythroid cells were conjugated with MHCI presenting ovalbumin peptide and 4-1BBL using the click methodology, as described in Example 15. Briefly, mouse peripheral blood was filtered through a PAL de-leukocyte filter and labeled with 0.04 mM 6′ Azido-NHS-ester in pH9 PBS for 30 min at room temperature. Azido-labeled mRCT were incubated with 40 μM m4-1BBL-DBCO-Thiolinker and 5 ul of 50 μM OVA-H2Kb-DBCO-thiolinker at room temperature for 1h and then further incubated at 4° C. overnight. CD8+ T cells were purified from secondary lymphoid organs of OT1 transgenic mice using negative selection kit from Miltenyi and labeled with 1 uM Cell-Trace Violet.

[1102] C57BL/6 mice were injected subcutaneously with 2E6 EG7.OVA tumor cells. When the tumor reached approximately 140 mm³, these mice were randomized into two groups of 7. These mice were then transferred with 2E6 OT1 T cells on day 1 post randomization and dosed with 1E9 mRCT or mRCT-OVA-4-1BBL on days 1, 4, and 8 post randomization. The mice cured with mRCT-OVA-4-1BBL (n=2) were re-challenged with 2E5 EG7.OVA, 37 days after primary tumor injection, side by side with age-matched naïve mice. Naïve mice also received 5E5 OT1 CD8 T cells transfer after 7 days of tumor injection. Tumor burden was measured every 2 to 3 days. The results of this experiment, as shown in FIG. 15A, demonstrate that mice that were previously treated with mRCT-OVA-4-1BBL were able to reject re-challenge of the EG7.OVA tumor cells, as evidenced by a reduction of EG7.OVA tumor volume over time as compared to that of the untreated mice.

[1103] In an independent experiment, C57BL/6 mice were injected subcutaneously with 2E6 EG7.OVA cells. When the tumor reached approximately 100 mm³, these mice were randomized into two groups of 12. They were then transferred with 5E5 OT1 T cells and dosed with 1E9 mRBC or mRBC-OVA-4-1BBL on days 0, 4, and 8 post randomization. The mouse cured with mRBC-OVA-4-1BBL(n=1) was re-challenged with 2E5 EG7.OVA, 35 days after primary tumor injection, side by side with age-matched naïve mice. Naïve mice also received 4E5 OT1 CD8 T cells transfer 11 days after tumor injection. Tumor burden was measured every 2 to 3 days. The results of this experiment, as shown in FIG. 15B, demonstrate that even upon being re-challenged with EG7.OVA tumor cells, mRCT-OVA-4-1BBL continued to activate tumor specific T cells (OT1), as evidenced by a reduction of EG7.OVA tumor volume over time as compared to that of the untreated mice.

[1104] Overall, these results demonstrate that mice that were previously cured of EG7.OVA tumors by mRCT treatment, maintain a memory response by preventing tumor growth upon being re-challenged with EG7.OVA tumor cells.

### Example 27: Mice Treated with Erythroid Cells Presenting MHCI (Ovalbumin) Only Demonstrate Antigen T Cell Specific Anergy Upon Re-Challenge with Antigen+Adjuvant

[1105] Murine erythroid cells were conjugated with MHCI presenting ovalbumin peptide using the click methodology, as described in Example 15. Briefly, mouse peripheral blood was filtered through a PAL de-leukocyte filter and labeled with 0.04 mM 6′ Azido-NHS-ester in pH8 PBS for 30 min at room temperature. Azido-labeled mRCT were incubated with 50 μM OVA-H2Kb-DBCO-thiolinker at room temperature for 1h and then further incubated at 4° C. overnight. CD8+ T cells were purified from secondary lymphoid organs of OT1 transgenic mice using negative selection kit from Miltenyi and labeled with 10 uM Cell-Trace Violet.

[1106] C57BL/6 mice were transferred with 2E6 OT1 T cells on day 0 and dosed with 1E9 mRCT or mRCT-OVA on days 0, 4, and 7. On day 13 mice were re-challenged with OVA peptide (SIINFEKL (SEQ ID NO: 721))+ Incomplete Freund's adjuvant (IFA) as shown in FIG. 16A. Mice treated with mRCT-OVA had lower OT1 cell counts upon OVA peptide re-challenge as compared to mice dosed only with mRCT in both spleen and lymph node as shown in FIG. 16B. The endogenous CD8+ T cell counts were not impacted by either treatment as demonstrated in FIG. 16C. Overall, these results demonstrate that mRCT-OVA was able to drive antigen specific T cell anergy or deletion, as shown by a reduction of OT1 count.

1. An artificial antigen presenting cell (aAPC), wherein the aAPC comprises an enucleated cell, wherein the enucleated cell comprises on the cell surface at least one exogenous antigenic polypeptide disclosed in Table 1 or Tables 14-24.

2-8. (canceled)

9. The aAPC of claim 1, wherein the aAPC further comprises on the cell surface an exogenous antigen-presenting polypeptide.

10. The aAPC of claim 9, wherein the exogenous antigen-presenting polypeptide is an MHC class I polypeptide, an MHC class I single chain fusion protein, an MHC class II polypeptide, or an MHC class II single chain fusion protein.

11-12. (canceled)

13. An artificial antigen presenting cell (aAPC), wherein the aAPC comprises an enucleated cell, wherein the enucleated cell comprises on the cell surface an exogenous antigen-presenting polypeptide and an exogenous antigenic polypeptide, wherein the exogenous antigen-presenting polypeptide is an MHC class I single chain fusion protein or an MHC class II single chain fusion protein.

14-22. (canceled)

23. The aAPC of claim 13, wherein the exogenous antigenic polypeptide is bound to the exogenous antigen-presenting polypeptide covalently.

24. The aAPC of claim 13, wherein the exogenous antigenic polypeptide is bound to the exogenous antigen-presenting polypeptide non-covalently.

25. The aAPC of claim 13, further comprising on the cell surface at least one exogenous costimulatory polypeptide and/or at least one exogenous cytokine polypeptide and/or at least one exogenous coinhibitory polypeptide.

26. The aAPC of claim 25, wherein the enucleated cell comprises at least one exogenous costimulatory polypeptide, and the at least one exogenous costimulatory polypeptide is selected from the group consisting of 4-1BBL, LIGHT, anti CD28, CD80, CD86, CD70, OX40L, GITRL, TIM4, SLAM, CD48, CD58, CD83, CD155, CD112, IL-15Rα fused to IL-15, IL-21, ICAM-1, a ligand for LFA-1, anti CD3, and a combination thereof.

27-28. (canceled)

29. The aAPC of claim 25, wherein the enucleated cell comprises at least one exogenous cytokine polypeptide, and the at least one exogenous cytokine polypeptide is selected from the group consisting of: IL2, IL15, 15Rα fused to IL-15, IL7, IL12, IL18, IL21, IL4, IL6, IL23, IL27, IL17, IL10, TGF-beta, IFN-gamma, IL-1 beta, GM-CSF, and IL-25.

30-31. (canceled)

32. The aAPC of claim 25, wherein the enucleated cell comprises at least one exogenous coinhibitory polypeptide, and the at least one exogenous co-inhibitory polypeptide is selected from the group consisting of the polypeptides disclosed in Table 7.

33-42. (canceled)

43. The aAPC of claim 1, further comprising on the cell surface an exogenous Treg cell expansion polypeptide.

44-54. (canceled)

55. The aAPC of claim 13, wherein the enucleated cell is an enucleated erythroid cell or a platelet.

56. A method of activating an antigen-specific T cell, the method comprising contacting the T cell with the aAPC of claim 13, thereby activating the antigen-specific T cell.

57. A method for inducing proliferation of a T cell expressing a receptor molecule, the method comprising contacting the T cell with the aAPC of claim 25, wherein the aAPC comprises an exogenous costimulatory polypeptide, and wherein the exogenous costimulatory polypeptide specifically binds with the receptor molecule, thereby inducing proliferation of said T cell.

58. A method of expanding a subset of a T cell population, the method comprising contacting a population of T cells comprising at least one T cell of the subset with an aAPC of claim 25, wherein the aAPC comprises an exogenous costimulatory polypeptide, and wherein the exogenous costimulatory polypeptide comprised on the surface of the aAPC specifically binds with a receptor molecule on the at least one T cell of the subset, and wherein binding of the exogenous costimulatory polypeptide to the receptor molecule induces proliferation of the at least one T cell of the subset, thereby expanding the subset of the T cell population.

59. A method of suppressing activity of a T cell, the method comprising contacting the T cell with the aAPC of claim 32, thereby suppressing activity of the T cell.

60. A method for activating a Treg cell, the method comprising contacting the Treg cell with the aAPC of claim 43, thereby activating the Treg cell.

61. A method of treating a subject in need of an altered immune response, the method comprising contacting a T cell of the subject with the aAPC of claim 1 or 13, thereby treating the subject in need of an altered immune response.

62. The method of claim 61, wherein the contacting is in vitro or in vivo.

63. (canceled)

64. A method of treating a subject in need of an altered immune response, the method comprising:
a) determining an expression profile of an antigen on a cell in the subject,
b) selecting an artificial antigen presenting cell (aAPC), wherein the aAPC is an engineered enucleated cell comprising on the cell surface an antigen-presenting polypeptide and at least one first exogenous antigenic polypeptide, and
c) administering the aAPC to the subject,
thereby treating the subject in need of the altered immune response.

65. A method of treating a subject in need of an altered immune response, the method comprising:
a) determining an HLA status of the subject,
b) selecting an artificial antigen presenting cell (aAPC) that is immunologically compatible with the subject, wherein the aAPC is an engineered enucleated cell comprising on the cell surface at least one first exogenous antigenic polypeptide and at least one antigen-presenting polypeptide, and
c) administering the aAPC to the subject,
thereby treating the subject in need of the altered immune response.

66. (canceled)

67. The method of claim 61, wherein the subject has cancer, an infectious disease, an autoimmune disease, or an allergic disease.

68-69. (canceled)

70. A method of inducing a T cell response to an antigen in a subject in need thereof, said method comprising:
obtaining a population of cells from the subject, wherein the population comprises a T cell,
contacting the population of cells with the aAPC of claim 13, wherein contacting the population of cells with the aAPC induces proliferation of an antigen-specific T cell that is specific for the at least one exogenous antigenic polypeptide, and
administering the antigen-specific T cell to the subject,
thereby inducing a T cell response to the antigen in the subject in need thereof.

71. (canceled)

72. A method of expanding a population of regulatory T (Treg) cells, the method comprising:
obtaining a population of cells from a subject, wherein the population comprises a Treg cell,
contacting the population with the aAPC of claim 43, wherein contacting the population with the aAPC induces proliferation of the Treg cell,
thereby expanding the population of Treg cells.

73-74. (canceled)

75. A method of making the aAPC of claim 1, the method comprising:
introducing an exogenous nucleic acid encoding the exogenous antigenic polypeptide into a nucleated cell; and
culturing the nucleated cell under conditions suitable for enucleation and for production of the exogenous antigenic polypeptide, thereby making an enucleated cell,
thereby making the aAPC.

76. (canceled)

77. A method of making the aAPC of claim 13, the method comprising:
introducing an exogenous nucleic acid encoding the exogenous antigenic polypeptide into a nucleated cell;
introducing an exogenous nucleic acid encoding the exogenous antigen-presenting polypeptide into the nucleated cell; and
culturing the nucleated cell under conditions suitable for enucleation and for production of the exogenous antigenic polypeptide and the exogenous antigen-presenting polypeptide, thereby making an enucleated cell,
thereby making the aAPC.

78-84. (canceled)

The application's sequence listing, which the Patent Office published only in electronic form, follows.

SEQUENCE LISTING (895 sequences)

SEQ ID NO: 1 - protein, 15 aa, Artificial Sequence
  source: /note="Description of Artificial Sequence: Synthetic peptide"
GGGGSGGGGSGGGGS

SEQ ID NO: 2 - protein, 9 aa, Artificial Sequence
  source: /note="Description of Artificial Sequence: Synthetic peptide"
YPYDVPDYA

SEQ ID NO: 3 - protein, 10 aa, Artificial Sequence
  source: /note="Description of Artificial Sequence: Synthetic peptide"
EQKLISEEDL

SEQ ID NO: 4 - protein, 8 aa, Artificial Sequence
  source: /note="Description of Artificial Sequence: Synthetic peptide"
DYKDDDDK

SEQ ID NO: 5 - DNA, 54 bp, Thosea asigna virus
gagggcagaggaagtcttctaacatgcggtgacgtggaggsgsstcccggccct

SEQ ID NO: 6 - protein, 5 aa, Artificial Sequence
  source: /note="Description of Artificial Sequence: Synthetic peptide"
  MOD_RES (3)..(3): Any amino acid
LPXTG

SEQ ID NO: 7 - protein, 5 aa, Artificial Sequence
  source: /note="Description of Artificial Sequence: Synthetic peptide"
  MOD_RES (3)..(3): Any amino acid
LPXTA

SEQ ID NO: 8 - protein, 9 aa, Homo sapiens
ALDVYNGLL

SEQ ID NO: 9 - protein, 9 aa, Homo sapiens
FLFLLFFWL

SEQ ID NO: 10 - protein, 9 aa, Homo sapiens
TLMSAMTNL

SEQ ID NO: 11 - protein, 9 aa, Homo sapiens
ILLWQPIPV

SEQ ID NO: 12 - protein, 9 aa, Homo sapiens
YLPFRNCRP

SEQ ID NO: 13 - protein, 10 aa, Homo sapiens
NLVRDDGSAV

SEQ ID NO: 14 - protein, 9 aa, Homo sapiens
RLFAFVRFT

SEQ ID NO: 15 - protein, 10 aa, Homo sapiens
VVQNFAKEFV

SEQ ID NO: 16 - protein, 11 aa, Homo sapiens
FVEHDDESPGL

SEQ ID NO: 17 - protein, 9 aa, Homo sapiens
YTDFHCQYV

SEQ ID NO: 18 - protein, 10 aa, Homo sapiens
FIASNGVKLV

SEQ ID NO: 19 - protein, 16 aa, Homo sapiens
  MOD_RES (16)..(16): D-amino acid
YSVYFNLPADTIYTNH

SEQ ID NO: 20 - protein, 9 aa, Homo sapiens
FPSDSWCYF

SEQ ID NO: 21 - protein, 9 aa, Homo sapiens
SYLDSGIHF

SEQ ID NO: 22 - protein, 13 aa, Homo sapiens
  MOD_RES (13)..(13): D-amino acid
FSWAMDLDPKGAE

SEQ ID NO: 23 - protein, 10 aa, Homo sapiens
ACDPHSGHFV

SEQ ID NO: 24 - protein, 9 aa, Homo sapiens
CILGKLFTK

SEQ ID NO: 25 - protein, 10 aa, Homo sapiens
  MOD_RES (10)..(10): D-amino acid
AVCPWTWLRG

SEQ ID NO: 26 - protein, 9 aa, Homo sapiens
ILDKVLVHL

SEQ ID NO: 27 - protein, 15 aa, Homo sapiens
  MOD_RES (15)..(15): D-amino acid
TLYQDDTLTLQAAGE

SEQ ID NO: 28 - protein, 9 aa, Homo sapiens
GLFGDIYLA

SEQ ID NO: 29 - protein, 10 aa, Homo sapiens
KILDAVVAQK

SEQ ID NO: 30 - protein, 9 aa, Homo sapiens
ETVSEQSNV

SEQ ID NO: 31 - protein, 14 aa, Homo sapiens
MIFEKHGFRRTTPP

SEQ ID NO: 32 - protein, 10 aa, Homo sapiens
SLADEAEVYL

SEQ ID NO: 33 - protein, 10 aa, Homo sapiens
TLDWLLQTPK

SEQ ID NO: 34 - protein, 10 aa, Homo sapiens
  MOD_RES (10)..(10): D-amino acid
  VARIANT (10)..(10): /replace="Leu"
  SITE (1)..(10): /note="Variant residues given in the sequence have no preference with respect to those in the annotations for variant positions"
ILNAMIAKII

SEQ ID NO: 35 - protein, 8 aa, Homo sapiens
CYMEAVAL

SEQ ID NO: 36 - protein, 9 aa, Homo sapiens
WRRAPAPGA

SEQ ID NO: 37 - protein, 9 aa, Homo sapiens
PVTWRRAPA

SEQ ID NO: 38 - protein, 12 aa, Homo sapiens
CVEWLRIYLENG

SEQ ID NO: 39 - protein, 10 aa, Homo sapiens
SLFEGIDIYT

SEQ ID NO: 40 - protein, 9 aa, Homo sapiens
AEPINIQTW

SEQ ID NO: 41 - protein, 9 aa, Homo sapiens
LMISRTPEV

SEQ ID NO: 42 - protein, 11 aa, Homo sapiens
FLEGNEVGKTY

SEQ ID NO: 43 - protein, 9 aa, Homo sapiens
KTLTSVFQK

SEQ ID NO: 44 - protein, 9 aa, Homo sapiens
FLDEFMEGV

SEQ ID NO: 45 - protein, 10 aa, Homo sapiens
KLVVVGAVGV

SEQ ID NO: 46 - protein, 9 aa, Homo sapiens
LVVVGAVGV

SEQ ID NO: 47 - protein, 9 aa, Homo sapiens
VVVGAVGVG

SEQ ID NO: 48 - protein, 9 aa, Homo sapiens
EEKLIVVLF

SEQ ID NO: 49 - protein, 11 aa, Homo sapiens
SELFRSGLDSY

SEQ ID NO: 50 - protein, 9 aa, Homo sapiens
FRSGLDSYV

SEQ ID NO: 51 - protein, 9 aa, Homo sapiens
EAFIQPITR

SEQ ID NO: 52 - protein, 12 aa, Homo sapiens
  MOD_RES (12)..(12): D-amino acid
RVIKNSIRLTLE

SEQ ID NO: 53 - protein, 8 aa, Homo sapiens
QQITKTEV

SEQ ID NO: 54 - protein, 9 aa, Homo sapiens
KELEGILLL

SEQ ID NO: 55 - protein, 16 aa, Homo sapiens
PYYFAAELPPRNLPEP

SEQ ID NO: 56 - protein, 10 aa, Homo sapiens
ILDTAGREEY

SEQ ID NO: 57 - protein, 9 aa, Homo sapiens
RPHVPESAF

SEQ ID NO: 58 - protein, 9 aa, Homo sapiens
KIFSEVTLK

SEQ ID NO: 59 - protein, 9 aa, Homo sapiens
SHETVIIEL

SEQ ID NO: 60 - protein, 15 aa, Homo sapiens
GELIGILNAAKVPAD

SEQ ID NO: 61 - protein, 9 aa, Homo sapiens
KINKNPKYK

SEQ ID NO: 62 - protein, 9 aa, Homo sapiens
KLSEQESLL

SEQ ID NO: 63 - protein, 9 aa, Homo sapiens
MLTNSCVKL

SEQ ID NO: 64 - protein, 9 aa, Homo sapiens
FMVELVEGA

SEQ ID NO: 65 - protein, 9 aa, Homo sapiens
GVRGRVEEI

SEQ ID NO: 66 - protein, 9 aa, Homo sapiens
SSKALQRPV

SEQ ID NO: 67 - protein, 9 aa, Homo sapiens
ATGFKQSSK

SEQ ID NO: 68 - protein, 11 aa, Homo sapiens
HSATGFKQSSK

SEQ ID NO: 69 - protein, 9 aa, Homo sapiens
KQSSKALQR

SEQ ID NO: 70 - protein, 9 aa, Homo sapiens
GFKQSSKAL

SEQ ID NO: 71 - protein, 17 aa, Homo sapiens
ATGFKQSSKALQRPVAS

SEQ ID NO: 72 - protein, 9 aa, Homo sapiens
LATEKSRWS

SEQ ID NO: 73 - protein, 10 aa, Homo sapiens
LATEKSRWSG

SEQ ID NO: 74 - protein, 9 aa, Homo sapiens
FGLATEKSR

SEQ ID NO: 75 - protein, 9 aa, Homo sapiens
GDFGLATEK

SEQ ID NO: 76 - protein, 29 aa, Homo sapiens
EDLTVKIGDFGLATEKSRWSGSHQFEQLS

SEQ ID NO: 77 - protein, 9 aa, Homo sapiens
FLIIWQNTM

SEQ ID NO: 78 - protein, 16 aa, Homo sapiens
TMKQICKKEIRRLHQY

SEQ ID NO: 79 - protein, 10 aa, Homo sapiens
  MOD_RES (10)..(10): D-amino acid
RIAECILGMI

SEQ ID NO: 80 - protein, 15 aa, Homo sapiens
IGRIAECILGMNPSR

SEQ ID NO: 81 - protein, 10 aa, Homo sapiens
YVDFREYEYY

SEQ ID NO: 82 - protein, 9 aa, Homo sapiens
VVMSWAPPV

SEQ ID NO: 83 - protein, 11 aa, Homo sapiens
  MOD_RES (11)..(11): D-amino acid
SLYKFSPFPLG

SEQ ID NO: 84 - protein, 9 aa, Homo sapiens
VVPCEPPEV

SEQ ID NO: 85 - protein, 25 aa, Homo sapiens
NSNHVASGAGEAAIETQSSSSEEIV

SEQ ID NO: 86 - protein, 10 aa, Homo sapiens
SPANSIRHNL

SEQ ID NO: 87 - protein, 10 aa, Homo sapiens
SPQNSIRHNL

SEQ ID NO: 88 - protein, 10 aa, Homo sapiens
LLLDDLLVSI

SEQ ID NO: 89 - protein, 9 aa, Homo sapiens
AMAPIKVRL

SEQ ID NO: 90 - protein, 9 aa, Homo sapiens
GYDQIMPKK

SEQ ID NO: 91 - protein, 9 aa, Homo sapiens
GYDQIMPKI

SEQ ID NO: 92 - protein, 10 aa, Homo sapiens
QRPYGYDQIM

SEQ ID NO: 93 - protein, 9 aa, Homo sapiens
LEEKKGNYV

SEQ ID NO: 94 - protein, 10 aa, Homo sapiens
  MOD_RES (10)..(10): D-amino acid
RLSSCVPVAG

SEQ ID NO: 95 - protein, 9 aa, Homo sapiens
AARAVFLAL

SEQ ID NO: 96 - protein, 15 aa, Homo sapiens
KPLFRRMSSLELVIA

SEQ ID NO: 97 - protein, 9 aa, Homo sapiens
FLDRFLSCM

SEQ ID NO: 98 - protein, 11 aa, Homo sapiens
SLIAAAAFCLA

SEQ ID NO: 99 - protein, 8 aa, Homo sapiens
YRPRPRRY

SEQ ID NO: 100 - protein, 9 aa, Homo sapiens
YYWPRPRRY

SEQ ID NO: 101 - protein, 10 aa, Homo sapiens
  VARIANT (10)..(10): /replace=" "
  SITE (1)..(10): /note="Variant residues given in the sequence have no preference with respect to those in the annotations for variant positions"
VLPDVFIRCV

SEQ ID NO: 102 - protein, 9 aa, Homo sapiens
FLAELAYDL

SEQ ID NO: 103 - protein, 10 aa, Homo sapiens
ATFLGSLTWK

SEQ ID NO: 104 - protein, 9 aa, Homo sapiens
MLAVISCAV

SEQ ID NO: 105 - protein, 9 aa, Homo sapiens
RQKRILVNL

SEQ ID NO: 106 - protein, 9 aa, Homo sapiens
NYNNFYRFL

SEQ ID NO: 107 - protein, 10 aa, Homo sapiens
EYSKECLKEF

SEQ ID NO: 108 - protein, 9 aa, Homo sapiens
EYLSLSDKI

SEQ ID NO: 109 - protein, 11 aa, Homo sapiens
MLMAQEALAFL

SEQ ID NO: 110 - protein, 9 aa, Homo sapiens
SLLMWITQC

SEQ ID NO: 111 - protein, 10 aa, Homo sapiens
LAAQERRVPR

SEQ ID NO: 112 - protein, 9 aa, Homo sapiens
ELVRRILSR

SEQ ID NO: 113 - protein, 9 aa, Homo sapiens
APRGVRMAV

SEQ ID NO: 114 - protein, 14 aa, Homo sapiens
SLLMWITQCFLPVF

SEQ ID NO: 115 - protein, 20 aa, Homo sapiens
QGAMLAAQERRVPRAAEVPR

SEQ ID NO: 116 - protein, 18 aa, Homo sapiens
AADHRQLQLSISSCLQQL

SEQ ID NO: 117 - protein, 22 aa, Homo sapiens
CLSRRPWKRSWSAGSCPGMPHL

SEQ ID NO: 118 - protein, 13 aa, Homo sapiens
ILSRDAAPLPRPG

SEQ ID NO: 119 - protein, 14 aa, Homo sapiens
AGATGGRGPRGAGA

SEQ ID NO: 120 - protein, 10 aa, Homo sapiens
RYCNLEGPPI

SEQ ID NO: 121 - protein, 24 aa, Homo sapiens
KWTEPYCVIAAVKIFPRFFMVAKQ

SEQ ID NO: 122 - protein, 20 aa, Homo sapiens
KCCKIRYCNLEGPPINSSVF

SEQ ID NO: 123 - protein, 9 aa, Homo sapiens
EADPTGHSY

SEQ ID NO: 124 - protein, 9 aa, Homo sapiens
YLEYRQVPV

SEQ ID NO: 125 - protein, 9 aa, Homo sapiens
YLEYRQVPD

SEQ ID NO: 126 - protein, 9 aa, Homo sapiens
KVLEYVIKV

SEQ ID NO: 127 - protein, 9 aa, Homo sapiens
SLFRAVITK

SEQ ID NO: 128 - protein, 9 aa, Homo sapiens
NYKHCFPEI

SEQ ID NO: 129 - protein, 10 aa, Homo sapiens
EVYDGREHSA

SEQ ID NO: 130 - protein, 9 aa, Homo sapiens
RVRFFFPSL

SEQ ID NO: 131 - protein, 10 aa, Homo sapiens
REPVTKAEML

SEQ ID NO: 132 - protein, 10 aa, Homo sapiens
KEADPTGHSY

SEQ ID NO: 133 - protein, 9 aa, Homo sapiens
DPARYEFLW

SEQ ID NO: 134 - protein, 11 aa, Homo sapiens
ITKKVADLVGF

SEQ ID NO: 135 - protein, 9 aa, Homo sapiens
SAFPTTINF

SEQ ID NO: 136 - protein, 9 aa, Homo sapiens
SAYGEPRKL

SEQ ID NO: 137 - protein, 15 aa, Homo sapiens
TSCILESLFRAVITK

SEQ ID NO: 138 - protein, 15 aa, Homo sapiens
PRALAETSYVKVLEY

SEQ ID NO: 139 - protein, 16 aa, Homo sapiens
FLLLKYRAREPVTKAE

SEQ ID NO: 140 - protein, 12 aa, Homo sapiens
EYVIKVSARVRF

SEQ ID NO: 141 - protein, 10 aa, Homo sapiens
YLQLVFGIEV

SEQ ID NO: 142 - protein, 9 aa, Homo sapiens
LVHFLLLKY

SEQ ID NO: 143 - protein, 9 aa, Homo sapiens
KMVELVHFL

SEQ ID NO: 144 - protein, 9 aa, Homo sapiens
LVQENYLEY

SEQ ID NO: 145 - protein, 9 aa, Homo sapiens
EYLQLVFGI

SEQ ID NO: 146 - protein, 9 aa, Homo sapiens
EGDCAPEEK

SEQ ID NO: 147 - protein, 14 aa, Homo sapiens
LLKYRAREPVTKAE

SEQ ID NO: 148 - protein, 9 aa, Homo sapiens
EVDPIGHLY

SEQ ID NO: 149 - protein, 10 aa, Homo sapiens
  MOD_RES (10)..(10): D-amino acid
FLWGPRALVD

SEQ ID NO: 150 - protein, 9 aa, Homo sapiens
KVAELVHFL

SEQ ID NO: 151 - protein, 10 aa, Homo sapiens
LVFGIELMEV

SEQ ID NO: 152 - protein, 9 aa, Homo sapiens
IMPKAGLLI

SEQ ID NO: 153 - protein, 9 aa, Homo sapiens
TFPDLESEF

SEQ ID NO: 154 - protein, 9 aa, Homo sapiens
VAELVHFLL

SEQ ID NO: 155 - protein, 10 aa, Homo sapiens
MEVDPIGHLY

SEQ ID NO: 156 - protein, 9 aa, Homo sapiens
YLEYRQVPG

SEQ ID NO: 157 - protein, 10 aa, Homo sapiens
  MOD_RES (10)..(10): D-amino acid
AELVHFLLLI

SEQ ID NO: 158 - protein, 9 aa, Homo sapiens
WQYFFPVIF

SEQ ID NO: 159 - protein, 16 aa, Homo sapiens
KKLLTQHFVQENYLEY

SEQ ID NO: 160 - protein, 15 aa, Homo sapiens
RKVAELVHFLLLKYR

SEQ ID NO: 161 - protein, 16 aa, Homo sapiens
ACYEFLWGPRALVETS

SEQ ID NO: 162 - protein, 12 aa, Homo sapiens
VIFSKASSSLQL

SEQ ID NO: 163 - protein, 15 aa, Homo sapiens
VFGIELMEVDPIGHL

SEQ ID NO: 164 - protein, 15 aa, Homo sapiens
GDNQIMPKAGLLIIV

SEQ ID NO: 165 - protein, 15 aa, Homo sapiens
TSYVKVLHHMVKISG

SEQ ID NO: 166 - protein, 16 aa, Homo sapiens
RKVAELVHFLLLKYRA

SEQ ID NO: 167 - protein, 10 aa, Homo sapiens
  VARIANT (10)..(10): /replace="Leu"
  SITE (1)..(10): /note="Variant residues given in the sequence have no preference with respect to those in the annotations for variant positions"
EVDPASNTYI

SEQ ID NO: 168 - protein, 10 aa, Homo sapiens
GVYDGREHTV

SEQ ID NO: 169 - protein, 9 aa, Homo sapiens
NYKRCFPVI

SEQ ID NO: 170 - protein, 8 aa, Homo sapiens
SESLKMIF

SEQ ID NO: 171 - protein, 9 aa, Homo sapiens
MVKISGGPR

SEQ ID NO: 172 - protein, 9 aa, Homo sapiens
EVDPIGHVY

SEQ ID NO: 173 - protein, 9 aa, Homo sapiens
ISGGPRISY

SEQ ID NO: 174 - protein, 9 aa, Homo sapiens
KVAELVRFL

SEQ ID NO: 175 - protein, 9 aa, Homo sapiens
GLMDVQIPT

SEQ ID NO: 176 - protein, 9 aa, Homo sapiens
ALSVMGVYV

SEQ ID NO: 177 - protein, 10 aa, Homo sapiens
  MOD_RES (10)..(10): D-amino acid
GLYDGMEHLL

SEQ ID NO: 178 - protein, 9 aa, Homo sapiens
SLLKFLAKV

SEQ ID NO: 179 - protein, 10 aa, Homo sapiens
  MOD_RES (10)..(10): D-amino acid
FLWGPRALVE

SEQ ID NO: 180 - protein, 9 aa, Homo sapiens
VRIGHLYIL

SEQ ID NO: 181 - protein, 15 aa, Homo sapiens
REPFTKAEMLGSVIR

SEQ ID NO: 182 - protein, 14 aa, Homo sapiens
AELVHFLLLKYRAR

SEQ ID NO: 183 - protein, 10 aa, Homo sapiens
ILFGISLREV

SEQ ID NO: 184 - protein, 9 aa, Homo sapiens
KVVEFLAML

SEQ ID NO: 185 - protein, 13 aa, Homo sapiens
SSALLSIFQSSPE

SEQ ID NO: 186 - protein, 9 aa, Homo sapiens
SFSYTLLSL

SEQ ID NO: 187 - protein, 9 aa, Homo sapiens
VSSFFSYTL

SEQ ID NO: 188 - protein, 10 aa, Homo sapiens
LLFGLALIEV

SEQ ID NO: 189 - protein, 9 aa, Homo sapiens
ALKDVEERV

SEQ ID NO: 190 - protein, 10 aa, Homo sapiens
TLDEKVAELV

SEQ ID NO: 191 - protein, 9 aa, Homo sapiens
KVLEFLAKL

SEQ ID NO: 192 - protein, 9 aa, Homo sapiens
FLAKLNNTV

SEQ ID NO: 193 - protein, 9 aa, Homo sapiens
VIWEVLNAV

SEQ ID NO: 194 - protein, 9 aa, Homo sapiens
SESIKKKVL

SEQ ID NO: 195 - protein, 9 aa, Homo sapiens
ASSTLYLVF

SEQ ID NO: 196 - protein, 15 aa, Homo sapiens
SSTLYLVFSPSSFST

SEQ ID NO: 197 - protein, 9 aa, Homo sapiens
FLWGPRALA

SEQ ID NO: 198 - protein, 9 aa, Homo sapiens
QLVFGIEVV

SEQ ID NO: 199 - protein, 20 aa, Homo sapiens
PDTRPAPGSTAPPAHGVTSA

SEQ ID NO: 200 - protein, 9 aa, Homo sapiens
QGQHFLQKV

SEQ ID NO: 201 - protein, 11 aa, Homo sapiens
SLLMWITQCFL

SEQ ID NO: 202 - protein, 9 aa, Homo sapiens
QLSLLMWIT

SEQ ID NO: 203 - protein, 9 aa, Homo sapiens
LLMWITQCF

SEQ ID NO: 204 - protein, 11 aa, Homo sapiens
YLAMPFATPME

SEQ ID NO: 205 - protein, 10 aa, Homo sapiens
ASGPGGGAPR

SEQ ID NO: 206 - protein, 10 aa, Homo sapiens
TVSGNILTIR

SEQ ID NO: 207 - protein, 13 aa, Homo sapiens
APRGPHGGAASGL

SEQ ID NO: 208 - protein, 11 aa, Homo sapiens
MPFATPMEAEL

SEQ ID NO: 209 - protein, 12 aa, Homo sapiens
KEFTVSGNILTI

SEQ ID NO: 210 - protein, 9 aa, Homo sapiens
MPFATPMEA

SEQ ID NO: 211 - protein, 9 aa, Homo sapiens
FATPMEAEL

SEQ ID NO: 212 - protein, 11 aa, Homo sapiens
FATPMEAELAR

SEQ ID NO: 213 - protein, 9 aa, Homo sapiens
LAMPFATPM

SEQ ID NO: 214 - protein, 9 aa, Homo sapiens
ARGPESRLL

SEQ ID NO: 215 - protein, 25 aa, Homo sapiens
LLEFYLAMPFATPMEAELARRSLAQ

SEQ ID NO: 216 - protein, 12 aa, Homo sapiens
EFYLAMPFATPM

SEQ ID NO: 217 - protein, 25 aa, Homo sapiens
PGVLLKEFTVSGNILTIRLTAADHR

SEQ ID NO: 218 - protein, 12 aa, Homo sapiens
RLLEFYLAMPFA

SEQ ID NO: 219 - protein, 13 aa, Homo sapiens
PFATPMEAELARR

SEQ ID NO: 220 - protein, 20 aa, Homo sapiens
PGVLLKEFTVSGNILTIRLT

SEQ ID NO: 221 - protein, 10 aa, Homo sapiens
VLLKEFTVSG

SEQ ID NO: 222 - protein, 15 aa, Homo sapiens
LKEFTVSGNILTIRL

SEQ ID NO: 223 - protein, 11 aa, Homo sapiens
KEFTVSGNILT

SEQ ID NO: 224 - protein, 14 aa, Homo sapiens
LLEFYLAMPFATPM

SEQ ID NO: 225 - protein, 9 aa, Homo sapiens
VLQELNVTV

SEQ ID NO: 226 - protein, 9 aa, Homo sapiens
ALCNTDSPL

SEQ ID NO: 227 - protein, 10 aa, Homo sapiens
LLAARAIVAI

SEQ ID NO: 228 - protein, 9 aa, Homo sapiens
TSTTSLELD

SEQ ID NO: 229 - protein, 10 aa, Homo sapiens
FLHHLIAEIH

SEQ ID NO: 230 - protein, 9 aa, Homo sapiens
DLWKETVFT

SEQ ID NO: 231 - protein, 9 aa, Homo sapiens
LYATVIHDI

SEQ ID NO: 232 - protein, 9 aa, Homo sapiens
ILDSSEEDK

SEQ ID NO: 233 - protein, 9 aa, Homo sapiens
KASEKIFYV

SEQ ID NO: 234 - protein, 9 aa, Homo sapiens
RLQGISPKI

SEQ ID NO: 235 - protein, 16 aa, Homo sapiens
EKIQKAFDDIAKYFSK

SEQ ID NO: 236 - protein, 11 aa, Homo sapiens
FGRLQGISPKI

SEQ ID NO: 237 - protein, 18 aa, Homo sapiens
WEKMKASEKIFYVYMKRK

SEQ ID NO: 238 - protein, 15 aa, Homo sapiens
KIFYVYMKRKYEAMT

SEQ ID NO: 239 - protein, 14 aa, Homo sapiens
KIFYVYMKRKYEAM

SEQ ID NO: 240 - protein, 20 aa, Homo sapiens
INKTSGPKRGKHAWTHRLRE

SEQ ID NO: 241 - protein, 20 aa, Homo sapiens
YFSKKEWEKMKSSEKIVYVY

SEQ ID NO: 242 - protein, 20 aa, Homo sapiens
MKLNYEVMTKLGFKVTLPPF

SEQ ID NO: 243 - protein, 20 aa, Homo sapiens
KHAWTHRLRERKQLVVYEEI

SEQ ID NO: 244 - protein, 20 aa, Homo sapiens
LGFKVTLPPFMRSKRAADFH

SEQ ID NO: 245 - protein, 20 aa, Homo sapiens
KSSEKIVYVYMKLNYEVMTK

SEQ ID NO: 246 - protein, 9 aa, Homo sapiens
RLSNRLLLR

SEQ ID NO: 247 - protein, 9 aa, Homo sapiens
SLGWLFLLL

SEQ ID NO: 248 - protein, 9 aa, Homo sapiens
LSRLSNRLL

SEQ ID NO: 249 - protein, 9 aa, Homo sapiens
LTYVSFRNL

SEQ ID NO: 250 - protein, 9 aa, Homo sapiens
DLPAYVRNL

SEQ ID NO: 251 - protein, 9 aa, Homo sapiens
FLTGNQLAV

SEQ ID NO: 252 - protein, 9 aa, Homo sapiens
GAFEHLPSL

SEQ ID NO: 253 - protein, 9 aa, Homo sapiens
RLARLALVL

SEQ ID NO: 254 - protein, 9 aa, Homo sapiens
PLADLSPFA

SEQ ID NO: 255 - protein, 9 aa, Homo sapiens
ILLRDAGLV

SEQ ID NO: 256 - protein, 15 aa, Homo sapiens
CEFHACWPAFTVLGE

SEQ ID NO: 257 - protein, 9 aa, Homo sapiens
ATTNILEHY

SEQ ID NO: 258 - protein, 10 aa, Homo sapiens
EVISCKLIKR

SEQ ID NO: 259 - protein, 9 aa, Homo sapiens
SYRNEIAYL

SEQ ID NO: 260 - protein, 9 aa, Homo sapiens
RQKKIRIQL

SEQ ID NO: 261 - protein, 16 aa, Homo sapiens
HLGSRQKKIRIQLRSQ

SEQ ID NO: 262 - protein, 17 aa, Homo sapiens
CATWKVICKSCISQTPG

SEQ ID NO: 263 - protein, 8 aa, Homo sapiens
AFLRHAAL

SEQ ID NO: 264 - protein, 10 aa, Homo sapiens
DYPSLSATDI

SEQ ID NO: 265 - protein, 9 aa, Homo sapiens
YMMPVNSEV

SEQ ID NO: 266 - protein, 9 aa, Homo sapiens
KLATAQFKI

SEQ ID NO: 267 - protein, 10 aa, Homo sapiens
VYVKGLLAKI

SEQ ID NO: 268 - protein, 9 aa, Homo sapiens
ALVDAGVPM

SEQ ID NO: 269 - protein, 9 aa, Homo sapiens
FLWGPRAYA

SEQ ID NO: 270 - protein, 9 aa, Homo sapiens
RLLVPTQFV

SEQ ID NO: 271 - protein, 9 aa, Homo sapiens
NLSSAEVVV

SEQ ID NO: 272 - protein, 9 aa, Homo sapiens
KTVNELQNL

SEQ ID NO: 273 - protein, 9 aa, Homo sapiens
FLPDHINIV

SEQ ID NO: 274 - protein, 9 aa, Homo sapiens
KTPFVSPLL

SEQ ID NO: 275 - protein, 10 aa, Homo sapiens
QLLDGFMITL

SEQ ID NO: 276 - protein, 9 aa, Homo sapiens
YLVGNVCIL

SEQ ID NO: 277 - protein, 9 aa, Homo sapiens
ELSDSLGPV

SEQ ID NO: 278 - protein, 9 aa, Homo sapiens
ILSLELMKL

SEQ ID NO: 279 - protein, 9 aa, Homo sapiens
SLEENIVIL

SEQ ID NO: 280 - protein, 9 aa, Homo sapiens
KGSGKMKTE

SEQ ID NO: 281 - protein, 9 aa, Homo sapiens
EYRGFTQDF

SEQ ID NO: 282 - protein, 9 aa, Homo sapiens
RLAEYQAYI

SEQ ID NO: 283 - protein, 9 aa, Homo sapiens
LLQAEAPRL

SEQ ID NO: 284 - protein, 9 aa, Homo sapiens
WLEYYNLER

SEQ ID NO: 285 - protein, 9 aa, Homo sapiens
QIRPIFSNR

SEQ ID NO: 286 - protein, 10 aa, Homo sapiens
VYDYNCHVDL

SEQ ID NO: 287 - protein, 9 aa, Homo sapiens
AYIDFEMKI

SEQ ID NO: 288 - protein, 10 aa, Homo sapiens
  MOD_RES (10)..(10): D-amino acid
YLSGANLNLG

SEQ ID NO: 289 - protein, 9 aa, Homo sapiens
IMIGVLVGV

SEQ ID NO: 290 - protein, 9 aa, Homo sapiens
GVLVGVALI

SEQ ID NO: 291 - protein, 10 aa, Homo sapiens
VLYGPDAPTV

SEQ ID NO: 292 - protein, 9 aa, Homo sapiens
YLSGANLNV

SEQ ID NO: 293 - protein, 9 aa, Homo sapiens
ATVGIMIGV

SEQ ID NO: 294 - protein, 9 aa, Homo sapiens
HLFGYSWYK

SEQ ID NO: 295 - protein, 10 aa, Homo sapiens
QYSWFVNGTF

SEQ ID NO: 296 - protein, 9 aa, Homo sapiens
TYACFVSNL

SEQ ID NO: 297 - protein, 10 aa, Homo sapiens
HRWCIPWQRL

SEQ ID NO: 298 - protein, 15 aa, Homo sapiens
AYVCGIQNSVSANRS

SEQ ID NO: 299 - protein, 25 aa, Homo sapiens
DTGFYTLHVIKSDLVNEEATGQFRV

SEQ ID NO: 300 - protein, 15 aa, Homo sapiens
YSWRINGIPQQHTQV

SEQ ID NO: 301 - protein, 13 aa, Homo sapiens
TYYRPGVNLSLSC

SEQ ID NO: 302 - protein, 13 aa, Homo sapiens
EIIYPNASLLIQN

SEQ ID NO: 303 - protein, 15 aa, Homo sapiens
YACFVSNLATGRNNS

SEQ ID NO: 304 - protein, 13 aa, Homo sapiens
LWWVNNQSLPVSP

SEQ ID NO: 305 - protein, 13 aa, Homo sapiens
NSIVKSITVSASG

SEQ ID NO: 306 - protein, 9 aa, Homo sapiens
KTWGQYWQV

SEQ ID NO: 307 - protein, 10 aa, Homo sapiens
  VARIANT (1)..(1): /replace=" "
  SITE (1)..(10): /note="Variant residues given in the sequence have no preference with respect to those in the annotations for variant positions"
AMLGTHTMEV

SEQ ID NO: 308 - protein, 9 aa, Homo sapiens
IMDQVPFSV

SEQ ID NO: 309 - protein, 9 aa, Homo sapiens
ITDQVPFSV

SEQ ID NO: 310 - protein, 9 aa, Homo sapiens
YLEPGPVTA

SEQ ID NO: 311 - protein, 10 aa, Homo sapiens
LLDGTATLRL

SEQ ID NO: 312 - protein, 10 aa, Homo sapiens
VLYRYGSFSV

SEQ ID NO: 313 - protein, 10 aa, Homo sapiens
SLADTNSLAV

SEQ ID NO: 314 - protein, 9 aa, Homo sapiens
RLMKQDFSV

SEQ ID NO: 315 - protein, 9 aa, Homo sapiens
RLPRIFCSC

SEQ ID NO: 316 - protein, 9 aa, Homo sapiens
LIYRRRLMK

SEQ ID NO: 317 - protein, 9 aa, Homo sapiens
ALLAVGATK

SEQ ID NO: 318 - protein, 10 aa, Homo sapiens
IALNFPGSQK

SEQ ID NO: 319 - protein, 9 aa, Homo sapiens
RSYVPLAHR

SEQ ID NO: 320 - protein, 9 aa, Homo sapiens
ALNFPGSQK

SEQ ID NO: 321 - protein, 9 aa, Homo sapiens
VYFFLPDHL

SEQ ID NO: 322 - protein, 9 aa, Homo sapiens
RTKQLYPEW

SEQ ID NO: 323 - protein, 10 aa, Homo sapiens
HTMEVTVYHR

SEQ ID NO: 324 - protein, 9 aa, Homo sapiens
SSPGCQPPA

SEQ ID NO: 325 - protein, 10 aa, Homo sapiens
VPLDCVLYRY

SEQ ID NO: 326 - protein, 9 aa, Homo sapiens
LPHSSSHWL

SEQ ID NO: 327 - protein, 8 aa, Homo sapiens
SNDGPTLI

SEQ ID NO: 328 - protein, 15 aa, Homo sapiens
GRAMLGTHTMEVTVY

SEQ ID NO: 329 - protein, 16 aa, Homo sapiens
WNRQLYPEWTEAQRLD

SEQ ID NO: 330 - protein, 18 aa, Homo sapiens
TTEWVETTARELPIPEPE

SEQ ID NO: 331 - protein, 17 aa, Homo sapiens
TGRAMLGTHTMEVTVYH

SEQ ID NO: 332 - protein, 9 aa, Homo sapiens
FLNQTDETL

SEQ ID NO: 333 - protein, 9 aa, Homo sapiens
MQLIYDSSL

SEQ ID NO: 334 - protein, 9 aa, Homo sapiens
KLLMVLMLA

SEQ ID NO: 335 - protein, 10 aa, Homo sapiens
LIYDSSLCDL

SEQ ID NO: 336 - protein, 9 aa, Homo sapiens
AIDELKECF

SEQ ID NO: 337 - protein, 9 aa, Homo sapiens
TTNAIDELK

SEQ ID NO: 338 - protein, 9 aa, Homo sapiens
PLLENVISK

SEQ ID NO: 339 - protein, 10 aa, Homo sapiens
  VARIANT (1)..(1): /replace=" "
  SITE (1)..(10): /note="Variant residues given in the sequence have no preference with respect to those in the annotations for variant positions"
EAAGIGILTV

SEQ ID NO: 340 - protein, 9 aa, Homo sapiens
ILTVILGVL

SEQ ID NO: 341 - protein, 10 aa, Homo sapiens
EAAGIGILTV

SEQ ID NO: 342 - protein, 11 aa, Homo sapiens
  VARIANT (10)..(10): /replace=" "
  SITE (1)..(10): /note="Variant residues given in the sequence have no preference with respect to those in the annotations for variant positions"
AEEAAGIGILT

SEQ ID NO: 343 - protein, 11 aa, Homo sapiens
RNGYRALMDKS

SEQ ID NO: 344 - protein, 30 aa, Artificial Sequence
  source: /note="Description of Artificial Sequence: Synthetic polypeptide"
YTTAEEAAGIGILTVILGVLLLIGCWYCRR

SEQ ID NO: 345 - protein, 12 aa, Homo sapiens
EEAAGIGILTVI

SEQ ID NO: 346 - protein, 14 aa, Homo sapiens
AAGIGILTVILGVL

SEQ ID NO: 347 - protein, 14 aa, Homo sapiens
  MOD_RES (9)..(9): D-amino acid
  MOD_RES (14)..(14): D-amino acid
APPAYEKLPSAEQF

SEQ ID NO: 348 - protein, 23 aa, Homo sapiens
RNGYRALMDKSLHVGTQCALTRR

SEQ ID NO: 349 - protein, 20 aa, Homo sapiens
MPREDAHFIYGYPKKGHGHS

SEQ ID NO: 350 - protein, 20 aa, Homo sapiens
KNCEPVVPNAPPAYEKLSAE

SEQ ID NO: 351 - protein, 9 aa, Homo sapiens
TILLGIFFL

SEQ ID NO: 352 - protein, 9 aa, Homo sapiens
FLALIICNA

SEQ ID NO: 353 - protein, 10 aa, Homo sapiens
KLLGPHVEGL

SEQ ID NO: 354 - protein, 10 aa, Homo sapiens
KLLGPHVLGV

SEQ ID NO: 355 - protein, 10 aa, Homo sapiens
GLFDEYLEMV

SEQ ID NO: 356 - protein, 9 aa, Homo sapiens
SLSKILDTV

SEQ ID NO: 357 - protein, 10 aa, Homo sapiens
LLSHGAVIEV

SEQ ID NO: 358 - protein, 9 aa, Homo sapiens
LYSACFWWL

SEQ ID NO: 359 - protein, 9 aa, Homo sapiens
IMLCLIAAV

SEQ ID NO: 360 - protein, 10 aa, Homo sapiens
FLTPKKLQCV

SEQ ID NO: 361 - protein, 10 aa, Homo sapiens
VISNDVCAQV

SEQ ID NO: 362 - protein, 9 aa, Homo sapiens
VLHWDPETV

SEQ ID NO: 363 - protein, 9 aa, Homo sapiens
FLRNFSLMV

SEQ ID NO: 364 - protein, 9 aa, Homo sapiens
FVFLRNFSL

SEQ ID NO: 365 - protein, 9 aa, Homo sapiens
FLRNFSLML

SEQ ID NO: 366 - protein, 9 aa, Homo sapiens
MSLQRQFLR

SEQ ID NO: 367 - protein, 21 aa, Homo sapiens
ISPNSVFSQWRVVCDSLEDYD

SEQ ID NO: 368 - protein, 10 aa, Homo sapiens
SLPYWNFATG

SEQ ID NO: 369 - protein, 15 aa, Homo sapiens
SQWRVVCDSLEDYDT

SEQ ID NO: 370 - protein, 10 aa, Homo sapiens
VYDFFVWLHY

SEQ ID NO: 371 - protein, 9 aa, Homo sapiens
SLDDYNHLV

SEQ ID NO: 372 - protein, 9 aa, Homo sapiens
FVWLHYYSV

SEQ ID NO: 373 - protein, 9 aa, Homo sapiens
SVYDFFVWL

SEQ ID NO: 374 - protein, 9 aa, Homo sapiens
TLDSQVMSL

SEQ ID NO: 375 - protein, 9 aa, Homo sapiens
LLGPGRPYR

SEQ ID NO: 376 - protein, 9 aa, Homo sapiens
ANDPIFVVL

SEQ ID NO: 377 - protein, 15 aa, Homo sapiens
QCTEVRADTRPWSGP

SEQ ID NO: 378 - protein, 10 aa, Homo sapiens
ALPYWNFATG

SEQ ID NO: 379 - protein, 9 aa, Homo sapiens
KCDICTDEY

SEQ ID NO: 380 - protein, 10 aa, Homo sapiens
DSDPDSFQDY

SEQ ID NO: 381 - protein, 11 aa, Homo sapiens
SSDYVIPIGTY

SEQ ID NO: 382 - protein, 9 aa, Homo sapiens
MLLAVLYCL

SEQ ID NO: 383 - protein, 10 aa, Homo sapiens
CLLWSFQTSA

SEQ ID NO: 384 - protein, 9 aa, Homo sapiens
YMDGTMSQV

SEQ ID NO: 385 - protein, 9 aa, Homo sapiens
AFLPWHRLF

SEQ ID NO: 386 - protein, 11 aa, Homo sapiens
IYMDGTADFSF

SEQ ID NO: 387 - protein, 9 aa, Homo sapiens
QCSGNFMGF

SEQ ID NO: 388 - protein, 12 aa, Homo sapiens
TPRLPSSADVEF

SEQ ID NO: 389 - protein, 9 aa, Homo sapiens
LPSSADVEF

SEQ ID NO: 390 - protein, 10 aa, Homo sapiens
LHHAFVDSIF

SEQ ID NO: 391 - protein, 10 aa, Homo sapiens
  MOD_RES (10)..(10): D-amino acid
SEIWRDIDFD

SEQ ID NO: 392 - protein, 15 aa, Homo sapiens
QNILLSNAPLGPQFP

SEQ ID NO: 393 - protein, 13 aa, Homo sapiens
SYLQDSDPDSFQD

SEQ ID NO: 394 - protein, 21 aa, Homo sapiens [sequence omitted]

SEQ ID NO: 395 - protein, 10 aa, Homo sapiens
SACDVSVRVV

SEQ ID NO: 396 - protein, 9 aa, Homo sapiens
YTDFVGEGL

SEQ ID NO: 397 - protein, 9 aa, Homo sapiens
YLIELIDRV

SEQ ID NO: 398 - protein, 9 aa, Homo sapiens
SVASTITGV

SEQ ID NO: 399 - protein, 9 aa, Homo sapiens
CITFQVWDV

SEQ ID NO: 400 - protein, 10 aa, Homo sapiens
FLPHFQALHV

SEQ ID NO: 401 - protein, 10 aa, Homo sapiens
RSDSGQQARY

SEQ ID NO: 402 - protein, 9 aa, Homo sapiens
LLYKLADLI

SEQ ID NO: 403 - protein, 10 aa, Homo sapiens
SLAMLDLLHV

SEQ ID NO: 404 - protein, 9 aa, Homo sapiens
MVYDLYKTL

SEQ ID NO: 405 - protein, 9 aa, Homo sapiens
RLDFNLIRV

SEQ ID NO: 406 - protein, 9 aa, Homo sapiens
GLQHWVPEL

SEQ ID NO: 407 - protein, 9 aa, Homo sapiens
NLFETPVEA

SEQ ID NO: 408 - protein, 9 aa, Homo sapiens
KLDVGNAEV

SEQ ID NO: 409 - protein, 10 aa, Homo sapiens
YLLQGMIAAV

SEQ ID NO: 410 - protein, 9 aa, Homo sapiens
YLQGMIAAV

SEQ ID NO: 411 - protein, 10 aa, Homo sapiens
PLFDFSWLSL

SEQ ID NO: 412 - protein, 10 aa, Homo sapiens
WLSLKTLLSL

SEQ ID NO: 413 - protein, 10 aa, Homo sapiens
YLNDHLEPWI

SEQ ID NO: 414 - protein, 9 aa, Homo sapiens
CQWGRLWQL

SEQ ID NO: 415 - protein, 10 aa, Homo sapiens
VFLPCDSWNL

SEQ ID NO: 416 - protein, 11 aa, Homo sapiens
CIPPDSLLFPA

SEQ ID NO: 417 - protein, 10 aa, Homo sapiens
YTLDRDSLYV

SEQ ID NO: 418 - protein, 9 aa, Homo sapiens
FIIENLKAA

SEQ ID NO: 419 - protein, 9 aa, Homo sapiens
FILPVLGAV

SEQ ID NO: 420 - protein, 10 aa, Homo sapiens
VLLQAGSLHA

SEQ ID NO: 421 - protein, 9 aa, Homo sapiens
LLGNCLPTV

SEQ ID NO: 422 - protein, 9 aa, Homo sapiens
SLQALKVTV

SEQ ID NO: 423 - protein, 9 aa, Homo sapiens
KFLDALISL

SEQ ID NO: 424 - protein, 9 aa, Homo sapiens
LLNAFTVTV

SEQ ID NO: 425 - protein, 9 aa, Homo sapiens
FAWERVRGL

SEQ ID NO: 426 - protein, 9 aa, Homo sapiens
GLGLPKLYL

SEQ ID NO: 427 - protein, 9 aa, Homo sapiens
LMAGCIQEA

SEQ ID NO: 428 - protein, 9 aa, Homo sapiens
LLEEMFLTV

SEQ ID NO: 429 - protein, 9 aa, Homo sapiens
KVHPVIWSL

SEQ ID NO: 430 - protein, 10 aa, Homo sapiens
LMLQNALTTM

SEQ ID NO: 431 - protein, 9 aa, Homo sapiens
YVDPVITSI

SEQ ID NO: 432 - protein, 9 aa, Homo sapiens
FMTRKLWDL

SEQ ID NO: 433 - protein, 9 aa, Homo sapiens
RLLASLQDL

SEQ ID NO: 434 - protein, 9 aa, Homo sapiens
ALYGDIDAV

SEQ ID NO: 435 - protein, 9 aa, Homo sapiens
LLDRFLATV

SEQ ID NO: 436 - protein, 9 aa, Homo sapiens
ILIDWLVQV

SEQ ID NO: 437 - protein, 9 aa, Homo sapiens
AKYLMELTM

SEQ ID NO: 438 - protein, 9 aa, Homo sapiens
AGYLMELCC

SEQ ID NO: 439 - protein, 9 aa, Homo sapiens
LLGATCMFV

SEQ ID NO: 440 - protein, 15 aa, Homo sapiens
NPPSMVAAGSVVAAV

SEQ ID NO: 441 - protein, 8 aa, Homo sapiens
VLEGMEVV

SEQ ID NO: 442 - protein, 10 aa, Homo sapiens
KLKHYGPGWV

SEQ ID NO: 443 - protein, 9 aa, Homo sapiens
DFMIQGGDF

SEQ ID NO: 444 - protein, 9 aa, Homo sapiens
KFHRVIKDF

SEQ ID NO: 445 - protein, 9 aa, Homo sapiens
WLQYFPNPV

SEQ ID NO: 446 - protein, 10 aa, Homo sapiens
ALGGHPLLGV

SEQ ID NO: 447 - protein, 9 aa, Homo sapiens
ITDFGLAKL

SEQ ID NO: 448 - protein, 9 aa, Homo sapiens
TMNGSKSPV

SEQ ID NO: 449 - protein, 9 aa, Homo sapiens
YQLDPKFIV

SEQ ID NO: 450 - protein, 9 aa, Homo sapiens
GLKAGVIAV

SEQ ID NO: 451 - protein, 10 aa, Homo sapiens
ILYENNVITV

SEQ ID NO: 452 - protein, 9 aa, Homo sapiens
ILYENNVIV

SEQ ID NO: 453 - protein, 9 aa, Homo sapiens
RYQLDPKFI

SEQ ID NO: 454 - protein, 9 aa, Homo sapiens
VLLLVLAGV

SEQ ID NO: 455 - protein, 9 aa, Homo sapiens
TLADFDPRV

SEQ ID NO: 456 - protein, 9 aa, Homo sapiens
VLAGVGFFI

SEQ ID NO: 457 - protein, 9 aa, Homo sapiens
IMNDMPIYM

SEQ ID NO: 458 - protein, 12 aa, Homo sapiens
DVTFNIICKKCG

SEQ ID NO: 459 - protein, 9 aa, Homo sapiens
FMVEDETVL

SEQ ID NO: 460 - protein, 10 aa, Homo sapiens
FINDEIFVEL

SEQ ID NO: 461 - protein, 9 aa, Homo sapiens
KYDCFLHPF

SEQ ID NO: 462 - protein, 9 aa, Homo sapiens
KYVGIEREM

SEQ ID NO: 463 - protein, 10 aa, Homo sapiens
  MOD_RES (10)..(10): D-amino acid
NTYASPRFKF

SEQ ID NO: 464 - protein, 9 aa, Homo sapiens
FVGEFFTDV

SEQ ID NO: 465 - protein, 9 aa, Homo sapiens
EYILSLEEL

SEQ ID NO: 466 - protein, 9 aa, Homo sapiens
HLSTAFARV

SEQ ID NO: 467 - protein, 10 aa, Homo sapiens
KYLKLSSSEL

SEQ ID NO: 468 - protein, 9 aa, Homo sapiens
TMTRVLQGV

SEQ ID NO: 469 - protein, 10 aa, Homo sapiens
GVNPVVSYAV

SEQ ID NO: 470 - protein, 9 aa, Homo sapiens
VLQVGLPAL

SEQ ID NO: 471 - protein, 9 aa, Homo sapiens
PAFSYSFFV

SEQ ID NO: 472 - protein, 9 aa, Homo sapiens
LLLGPLGPL

SEQ ID NO: 473 - protein, 9 aa, Homo sapiens
KMLKSFLKA

SEQ ID NO: 474 - protein, 9 aa, Homo sapiens
ALPPPLMLL

SEQ ID NO: 475 - protein, 9 aa, Homo sapiens
WLSLLFKKL

SEQ ID NO: 476 - protein, 9 aa, Homo sapiens
KIFGSLAFL

SEQ ID NO: 477 - protein, 9 aa, Homo sapiens
IISAVVGIL

SEQ ID NO: 478 - protein, 9 aa, Homo sapiens
ALCRWGLLL

SEQ ID NO: 479 - protein, 9 aa, Homo sapiens
ILHNGAYSL

SEQ ID NO: 480 - protein, 9 aa, Homo sapiens
RLLQETELV

SEQ ID NO: 481 - protein, 9 aa, Homo sapiens
VVLGVVFGI

SEQ ID NO: 482 - protein, 10 aa, Homo sapiens
YMIMVKCWMI

SEQ ID NO: 483 - protein, 9 aa, Homo sapiens
HLYQGCQVV

SEQ ID NO: 484 - protein, 10 aa, Homo sapiens
YLVPQQGFFC

SEQ ID NO: 485 - protein, 9 aa, Homo sapiens
PLQPEQLQV

SEQ ID NO: 486 - protein, 9 aa, Homo sapiens
TLEEITGYL

SEQ ID NO: 487 - protein, 9 aa, Homo sapiens
ALIHHNTHL

SEQ ID NO: 488 - protein, 9 aa, Homo sapiens
PLTSIISAV

SEQ ID NO: 489 - protein, 9 aa, Homo sapiens
KLFGSLAFV

SEQ ID NO: 490 - protein, 9 aa, Homo sapiens
ITDFGLARL

SEQ ID NO: 491 - protein, 9 aa, Homo sapiens
KVFGSLAFV

SEQ ID NO: 492 - protein, 9 aa, Homo sapiens
AVVGILLVV

SEQ ID NO: 493 - protein, 9 aa, Homo sapiens
QLFEDNYAL

SEQ ID NO: 494 - protein, 9 aa, Homo sapiens
QIAKGMSYL

SEQ ID NO: 495 - protein, 10 aa, Homo sapiens
LIAHNQVRQV

SEQ ID NO: 496 - protein, 9 aa, Homo sapiens
VLRENTSPK

SEQ ID NO: 497 - protein, 9 aa, Homo sapiens
TYLPTNASL

SEQ ID NO: 498 - protein, 9 aa, Homo sapiens
RYAMTVWYF

SEQ ID NO: 499 - protein, 9 aa, Homo sapiens
FLLGLIFLL

SEQ ID NO: 500 - protein, 9 aa, Homo sapiens
LLLGIGILV

SEQ ID NO: 501 - protein, 10 aa, Homo sapiens
LLQLGYSGRL

SEQ ID NO: 502 - protein, 9 aa, Homo sapiens
LLQLYSGRL

SEQ ID NO: 503 - protein, 9 aa, Homo sapiens
SLLSGDWVL

SEQ ID NO: 504 - protein, 9 aa, Homo sapiens
GLQLGVQAV

SEQ ID NO: 505 - protein, 9 aa, Homo sapiens
PLTEYIQPV

SEQ ID NO: 506 - protein, 8 aa, Homo sapiens
APLLRWVL

SEQ ID NO: 507 - protein, 9 aa, Homo sapiens
LLLLDVAPL

SEQ ID NO: 508 - protein, 9 aa, Homo sapiens
LLDVAPLSL

SEQ ID NO: 509 - protein, 10 aa, Homo sapiens
YSWMDISCWI

SEQ ID NO: 510 - protein, 9 aa, Homo sapiens
SPRWWPTCL

SEQ ID NO: 511 - protein, 9 aa, Homo sapiens
ALLEIASCL

SEQ ID NO: 512 - protein, 10 aa, Homo sapiens
APAGRPSASR

SEQ ID NO: 513 - protein, 9 aa, Homo sapiens
RSRRVLYPR

SEQ ID NO: 514 - protein, 9 aa, Homo sapiens
APAGRPSAS

SEQ ID NO: 515 - protein, 9 aa, Homo sapiens
  MOD_RES (1)..(9): D-amino acid
VLYPRVVRR

SEQ ID NO: 516 - protein, 9 aa, Homo sapiens
WLPFGFILI

SEQ ID NO: 517 - protein, 9 aa, Homo sapiens
WYEGLDHAL

SEQ ID NO: 518 - protein, 9 aa, Homo sapiens
ALMEQQHYV

SEQ ID NO: 519 - protein, 9 aa, Homo sapiens
GVALQTMKQ

SEQ ID NO: 520 - protein, 9 aa, Homo sapiens
FMNKFIYEI

SEQ ID NO: 521 - protein, 10 aa, Homo sapiens
GLSPNLNRFL

SEQ ID NO: 522 - protein, 9 aa, Homo sapiens
PLFQVPEPV

SEQ ID NO: 523 - protein, 9 aa, Homo sapiens
ILLWAARYD

SEQ ID NO: 524 - protein, 9 aa, Homo sapiens
EYSRRHPQL

SEQ ID NO: 525 - protein, 9 aa, Homo sapiens
AYTKKAPQL

SEQ ID NO: 526 - protein, 9 aa, Homo sapiens
EYYLQNAFL

SEQ ID NO: 527 - protein, 9 aa, Homo sapiens
KYIQESQAL

SEQ ID NO: 528 - protein, 9 aa, Homo sapiens
RSCGLFQKL

SEQ ID NO: 529 - protein, 10 aa, Homo sapiens
QLAVSVILRV

SEQ ID NO: 530 - protein, 9 aa, Homo sapiens
QLYALPCVL

SEQ ID NO: 531 - protein, 9 aa, Homo sapiens
ALLNIKVKL

SEQ ID NO: 532 - protein, 9 aa, Homo sapiens
FLGYLILGV

SEQ ID NO: 533 - protein, 15 aa, Homo sapiens
SVSESDTIRSISIAS

SEQ ID NO: 534 - protein, 15 aa, Homo sapiens
LLANGRMPTVLQCVN

SEQ ID NO: 535 - protein, 15 aa, Homo sapiens
RMPTVLQCVNVSVVS

SEQ ID NO: 536 - protein, 9 aa, Homo sapiens
LLSDDDVVV

SEQ ID NO: 537 - protein, 10 aa, Homo sapiens
AQPDTAPLPV

SEQ ID NO: 538 - protein, 9 aa, Homo sapiens
CIAEQYHTV

SEQ ID NO: 539 - protein, 9 aa, Homo sapiens
ETVELQISL

SEQ ID NO: 540 - protein, 9 aa, Homo sapiens
TLYEAVREV

SEQ ID NO: 541 - protein, 9 aa, Homo sapiens
KLVERLGAA

SEQ ID NO: 542 - protein, 9 aa, Homo sapiens
DVWSFGILL

SEQ ID NO: 543 - protein, 9 aa, Homo sapiens
TFDYLRSVL

SEQ ID NO: 544 - protein, 9 aa, Homo sapiens
HYTNASDGL

SEQ ID NO: 545 - protein, 10 aa, Homo sapiens
DYLRSVLEDF

SEQ ID NO: 546 - protein, 10 aa, Homo sapiens
QLCPICRAPV

SEQ ID NO: 547 - protein, 10 aa, Homo sapiens
RLASFYDWLP

SEQ ID NO: 548 - protein, 9 aa, Homo sapiens
SLGSPVLGL

SEQ ID NO: 549 - protein, 9 aa, Homo sapiens
GPRESRPPA

SEQ ID NO: 550 - protein, 10 aa, Homo sapiens
FLPEFGISSA

SEQ ID NO: 551 - protein, 9 aa, Homo sapiens
RIDITLSSV

SEQ ID NO: 552 - protein, 10 aa, Homo sapiens
GYCASLFAIL

SEQ ID NO: 553 - protein, 14 aa, Homo sapiens
LPAVVGLSPGEQEY

SEQ ID NO: 554 - protein, 16 aa, Homo sapiens
VGQDVSVLFRVTGALQ

SEQ ID NO: 555 - protein, 8 aa, Homo sapiens
VLFYLGQY

SEQ ID NO: 556 - protein, 8 aa, Homo sapiens
LLGDLFGV

SEQ ID NO: 557 - protein, 9 aa, Homo sapiens
TLNDECWPA

SEQ ID NO: 558 - protein, 14 aa, Homo sapiens
ERISSTLNDECWPA

SEQ ID NO: 559 - protein, 13 aa, Homo sapiens
TSREQFLPSEGAA

SEQ ID NO: 560 - protein, 14 aa, Homo sapiens
CPPWHPSERISSTL

SEQ ID NO: 561 - protein, 9 aa, Homo sapiens
RLPPKPPLA

SEQ ID NO: 562 - protein, 9 aa, Homo sapiens
RCPPKPPLA

SEQ ID NO: 563 - protein, 9 aa, Homo sapiens
TLKCDCEIL

SEQ ID NO: 564 - protein, 9 aa, Homo sapiens
RLGPTLMCL

SEQ ID NO: 565 - protein, 9 aa, Homo sapiens
LLLEAVPAV

SEQ ID NO: 566 - protein, 9 aa, Homo sapiens
WLPKILGEV

SEQ ID NO: 567 - protein, 9 aa, Homo sapiens
VLSVNVPDV

SEQ ID NO: 568 - protein, 9 aa, Homo sapiens
CMHLLLEAV

SEQ ID NO: 569 - protein, 9 aa, Homo sapiens
ALLALTSAV

SEQ ID NO: 570 - protein, 9 aa, Homo sapiens
AQCQETIRV

SEQ ID NO: 571 - protein, 15 aa, Homo sapiens
LTLLALLALTSAVAK

SEQ ID NO: 572 - protein, 10 aa, Homo sapiens
  MOD_RES (10)..(10): D-amino acid
GLPPDVQRVH

SEQ ID NO: 573 - protein, 12 aa, Homo sapiens
SLFPNSPKWTSK

SEQ ID NO: 574 - protein, 9 aa, Homo sapiens
QLLIKAVNL

SEQ ID NO: 575 - protein, 9 aa, Homo sapiens
STLCQVEPV

SEQ ID NO: 576 - protein, 9 aa, Homo sapiens
AYVPQQAWI

SEQ ID NO: 577 - protein, 9 aa, Homo sapiens
VYSDADIFL

SEQ ID NO: 578 - protein, 10 aa, Homo sapiens
NYSVRYRPGL

SEQ ID NO: 579 - protein, 9 aa, Homo sapiens
LYAWEPSFL

SEQ ID NO: 580 - protein, 9 aa, Homo sapiens
STAPPVHNV

SEQ ID NO: 581 - protein, 9 aa, Homo sapiens
LLLLTVLTV

SEQ ID NO: 582 - protein, 9 aa, Homo sapiens
STAPPAHGV

SEQ ID NO: 583 - protein, 9 aa, Homo sapiens
DVTSAPDNK

SEQ ID NO: 584 - protein, 9 aa, Homo sapiens
VPGWGIALL

SEQ ID NO: 585 - protein, 10 aa, Homo sapiens
DPSTDYYQEL

SEQ ID NO: 586 - protein, 9 aa, Homo sapiens
TEAASRYNL

SEQ ID NO: 587 - protein, 12 aa, Homo sapiens
PGSTAPPAHGVT

SEQ ID NO: 588 - protein, 9 aa, Homo sapiens
TCQPTCRSL

SEQ ID NO: 589 - protein, 10 aa, Homo sapiens
GCELKADKDY

SEQ ID NO: 590 - protein, 9 aa, Homo sapiens
AYGLDFYIL

SEQ ID NO: 591 - protein, 9 aa, Homo sapiens
LLGRNSFEV

SEQ ID NO: 592 - protein, 9 aa, Homo sapiens
RMPEAAPPV

SEQ ID NO: 593 - protein, 11 aa, Homo sapiens
LLPENNVLSPV

SEQ ID NO: 594 - protein, 9 aa, Homo sapiens
SLPPPGTRV

SEQ ID NO: 595 - protein, 9 aa, Homo sapiens
YLGSYGFRL

SEQ ID NO: 596 - protein, 9 aa, Homo sapiens
SMPPPGTRV

SEQ ID NO: 597 - protein, 11 aa, Homo sapiens
GLAPPQHLIRV

SEQ ID NO: 598 - protein, 9 aa, Homo sapiens
KLCPVQLWV

SEQ ID NO: 599 - protein, 9 aa, Homo sapiens
KTCPVQLWV

SEQ ID NO: 600 - protein, 9 aa, Homo sapiens
AIYKQSQHM

SEQ ID NO: 601 - protein, 9 aa, Homo sapiens
SQKTYQGSY

SEQ ID NO: 602 - protein, 9 aa, Homo sapiens
TRVLAMAIY

SEQ ID NO: 603 - protein, 13 aa, Homo sapiens
PGTRVRAMAIYKQ

SEQ ID NO: 604 - protein, 12 aa, Homo sapiens
HLIRVEGNLRVE

SEQ ID NO: 605 - protein, 9 aa, Homo sapiens
KLAKPLSSL

SEQ ID NO: 606 - protein, 9 aa, Homo sapiens
VLLGMEGSV

SEQ ID NO: 607 - protein, 9 aa, Homo sapiens
ALPSFQIPV

SEQ ID NO: 608 - protein, 9 aa, Homo sapiens
QLMAFNHLV

SEQ ID NO: 609 - protein, 9 aa, Homo sapiens
TLPGYPPHV

SEQ ID NO: 610 - protein, 12 aa, Homo sapiens
CTACRWKKACQR

SEQ ID NO: 611 - protein, 9 aa, Homo sapiens
IIGGGMAFT

SEQ ID NO: 612 - protein, 9 aa, Homo sapiens
VLDGLDVLL

SEQ ID NO: 613 - protein, 10 aa, Homo sapiens
SLYSFPEPEA

SEQ ID NO: 614 - protein, 10 aa, Homo sapiens
ALYVDSLFFL

SEQ ID NO: 615 - protein, 9 aa, Homo sapiens
SLLQHLIGL

SEQ ID NO: 616 - protein, 10 aa, Homo sapiens
  MOD_RES (10)..(10): D-amino acid
LYVDSLFFLC

SEQ ID NO: 617 - protein, 9 aa, Homo sapiens
GQHLHLETF

SEQ ID NO: 618 - protein, 10 aa, Homo sapiens
FGLFPRLCPV

SEQ ID NO: 619 - protein, 10 aa, Homo sapiens
HSTNGVTRIY

SEQ ID NO: 620 - protein, 9 aa, Homo sapiens
VLAGGFFLL

SEQ ID NO: 621 - protein, 9 aa, Homo sapiens
LYSDPADYF

SEQ ID NO: 622 - protein, 9 aa, Homo sapiens
NYARTEDFF

SEQ ID NO: 623 - protein, 9 aa, Homo sapiens
LKLSGVVRL

SEQ ID NO: 624 - protein, 11 aa, Homo sapiens
  MOD_RES (11)..(11): D-amino acid
PLPPARNGGLG

SEQ ID NO: 625 - protein, 10 aa, Homo sapiens
SPSSNRIRNT

SEQ ID NO: 626 - protein, 9 aa, Homo sapiens
YMFDVTSRV

SEQ ID NO: 627 - protein, 9 aa, Homo sapiens
IMFDVTSRV

SEQ ID NO: 628 - protein, 9 aa, Homo sapiens
HPLVFHTNR

SEQ ID NO: 629 - protein, 9 aa, Homo sapiens
IIMFDVTSR

SEQ ID NO: 630 - protein, 9 aa, Homo sapiens
LAALPHSCL

SEQ ID NO: 631 - protein, 10 aa, Homo sapiens
GLASFKSFLK

SEQ ID NO: 632 - protein, 9 aa, Homo sapiens
MAQKRIHAL

SEQ ID NO: 633 - protein, 9 aa, Homo sapiens
KNKRILMEH

SEQ ID NO: 634 - protein, 10 aa, Homo sapiens
RAGLQVRKNK

SEQ ID NO: 635 - protein, 10 aa, Homo sapiens
  VARIANT (10)..(10): /replace=" "
  SITE (1)..(10): /note="Variant residues given in the sequence have no preference with respect to those in the annotations for variant positions"
ALWPWLLMAT

SEQ ID NO: 636 - protein, 9 aa, Homo sapiens
NSQPVWLCL

SEQ ID NO: 637 - protein, 9 aa, Homo sapiens
LPRWPPPQL

SEQ ID NO: 638 - protein, 9 aa, Homo sapiens
DYSARWNEI

SEQ ID NO: 639 - protein, 9 aa, Homo sapiens
AYDFLYNYL

SEQ ID NO: 640 - protein, 9 aa, Homo sapiens
SYTRLFLIL

SEQ ID NO: 641 - protein, 9 aa, Homo sapiens
KMDAEHPEL

SEQ ID NO: 642 - protein, 9 aa, Homo sapiens
FLTPLRNFL

SEQ ID NO: 643 - protein, 9 aa, Homo sapiens
AWISKPPGV

SEQ ID NO: 644 - protein, 10 aa, Homo sapiens
SAWISKPPGV

SEQ ID NO: 645 - protein, 10 aa, Homo sapiens
MYIFPVHWQF

SEQ ID NO: 646 - protein, 9 aa, Homo sapiens
DYIGPCKYI

SEQ ID NO: 647 - protein, 9 aa, Homo sapiens
KLQELNYNL

SEQ ID NO: 648 - protein, 9 aa, Homo sapiens
MIAVFLPIV

SEQ ID NO: 649 - protein, 9 aa, Homo sapiens
FLYTLLREV

SEQ ID NO: 650 - protein, 9 aa, Homo sapiens
LLLGTIHAL

SEQ ID NO: 651 - protein, 15 aa, Homo sapiens
HQQYFYKIPILVINK

SEQ ID NO: 652 - protein, 10 aa, Homo sapiens
ELTLGEFLKL

SEQ ID NO: 653 - protein, 9 aa, Homo sapiens
QMFFCFKEL

SEQ ID NO: 654 - protein, 9 aa, Homo sapiens
LMLGEFLKL

SEQ ID NO: 655 - protein, 10 aa, Homo sapiens
TLPPAWQPFL

SEQ ID NO: 656 - protein, 15 aa, Homo sapiens
TLGEFLKLDRERAKN

SEQ ID NO: 657 - protein, 9 aa, Homo sapiens
AYACNTSTL

SEQ ID NO: 658 - protein, 9 aa, Homo sapiens
ILAKFLHWL

SEQ ID NO: 659 - protein, 9 aa, Homo sapiens
RLVDDFLLV

SEQ ID NO: 660 - protein, 9 aa, Homo sapiens
LLTSRLRFI

SEQ ID NO: 661 - protein, 9 aa, Homo sapiens
RLFFYRKSV

SEQ ID NO: 662 - protein, 9 aa, Homo sapiens
KLFGVLRLK

SEQ ID NO: 663 - protein, 15 aa, Homo sapiens
RPGLLGASVLGLDDI

SEQ ID NO: 664 - protein, 15 aa, Homo sapiens
LTDLQPYMRQFVAHL

SEQ ID NO: 665 - protein, 9 aa, Homo sapiens
FLPATLTMV

SEQ ID NO: 666 - protein, 9 aa, Homo sapiens
FLYDDNQRV

SEQ ID NO: 667 - protein, 9 aa, Homo sapiens
YQLCLTNIF

SEQ ID NO: 668 - protein, 10 aa, Homo sapiens
LMALPPCHAL

SEQ ID NO: 669 - protein, 9 aa, Homo sapiens
SRFGGAVVR

SEQ ID NO: 670 - protein, 10 aa, Homo sapiens
FLSTLTIDGV

SEQ ID NO: 671 - protein, 9 aa, Homo sapiens
ASLDSDPWV

SEQ ID NO: 672 - protein, 9 aa, Homo sapiens
DLLSHAFFA

SEQ ID NO: 673 - protein, 11 aa, Homo sapiens
TSEKRPFMCAY

SEQ ID NO: 674 - protein, 9 aa, Homo sapiens
RMFPNAPYL

SEQ ID NO: 675 - protein, 9 aa, Homo sapiens
YMFPNAPYL

SEQ ID NO: 676 - protein, 9 aa, Homo sapiens
CMTWNQMNL

SEQ ID NO: 677 - protein, 9 aa, Homo sapiens
CYTWNQMNL

SEQ ID NO: 678 - protein, 9 aa, Homo sapiens
RWPSCQKKF

SEQ ID NO: 679 - protein, 11 aa, Homo sapiens
LSHLQMHSRKH

SEQ ID NO: 680 - protein, 16 aa, Homo sapiens
KRYFKLSHLQMHSRKH

SEQ ID NO: 681 - protein, 9 aa, Homo sapiens
LLSGQPASA

SEQ ID NO: 682 - protein, 10 aa, Homo sapiens
NVLHFFNAPL

SEQ ID NO: 683 - protein, 9 aa, Homo sapiens
KLPNSVLGR

SEQ ID NO: 684 - protein, 10 aa, Homo sapiens
RVAALARDAP

SEQ ID NO: 685 - protein, 9 aa, Homo sapiens
LLVLLYSKL

SEQ ID NO: 686 - protein, 9 aa, Homo sapiens
YLMDTSGKV

SEQ ID NO: 687 - protein, 9 aa, Homo sapiens
VPYGSFKHV

SEQ ID NO: 688 - protein, 10 aa, Homo sapiens
RLYPWGVVEV

SEQ ID NO: 689 - protein, 9 aa, Homo sapiens
CHILLGNYC

SEQ ID NO: 690 - protein, 21 aa, Homo sapiens
MEVGWYRSPFSRVVHLYRNGK

SEQ ID NO: 691 - protein, 9 aa, Epstein Barr Virus
CLGGLLTMV

SEQ ID NO: 692 - protein, 9 aa, Epstein Barr Virus
GLCTLVAML

SEQ ID NO: 693 - protein, 9 aa, Epstein Barr Virus
FLYALALLL

SEQ ID NO: 694 - protein, 9 aa, Epstein Barr Virus
YVLDHLIVV

SEQ ID NO: 695 - protein, 9 aa, Epstein Barr Virus
RLRAEAQVK

SEQ ID NO: 696 - protein, 10 aa, Epstein Barr Virus
AVFDRKSDAK

SEQ ID NO: 697 - protein, 9 aa, Epstein Barr Virus
RPPIFIRLL

SEQ ID NO: 698 - protein, 9 aa, Epstein Barr Virus
VLQWASLAV

SEQ ID NO: 699 - protein, 9 aa, Epstein Barr Virus
FMVFLQTHI

SEQ ID NO: 700 - protein, 10 aa, Epstein Barr Virus
FLQTHIFAEV

SEQ ID NO: 701 - protein, 10 aa, Epstein Barr Virus
SIVCYFMVFL

SEQ ID NO: 702 - protein, 11 aa, Cytomegalovirus
YSEHPTFTSQY

SEQ ID NO: 703 - protein, 9 aa, Cytomegalovirus
VTEHDTLLY

SEQ ID NO: 704 - protein, 9 aa, Cytomegalovirus
NLVPMVATV

SEQ ID NO: 705 - protein, 9 aa, Cytomegalovirus
VLEETSVML

SEQ ID NO: 706 - protein, 11 aa, Cytomegalovirus
TTVYPPSSTAK

SEQ ID NO: 707 - protein, 9 aa, Cytomegalovirus
GPISGHVLK

SEQ ID NO: 708 - protein, 10 aa, Cytomegalovirus
TPRVTGGGAM

SEQ ID NO: 709 - protein, 10 aa, Cytomegalovirus
RPHERNGFTV

SEQ ID NO: 710 - protein, 9 aa, Influenza virus
VSDGGPNLY

SEQ ID NO: 711 - protein, 9 aa, Influenza virus
GILGFVFTL

SEQ ID NO: 712 - protein, 10 aa, Human papilloma virus
TIHDIILECV

SEQ ID NO: 713 - protein, 9 aa, Human papilloma virus
YMLDLQPET

SEQ ID NO: 714 - protein, 10 aa, Human papilloma virus
YMLDLQPETT

SEQ ID NO: 715 - protein, 10 aa, Homo sapiens
GLYDGMEHLI

SEQ ID NO: 716 - protein, 19 aa, Homo sapiens
VAELVHFLLMEVDPIGHLY

SEQ ID NO: 717 - protein, 10 aa, Artificial Sequence
  source: /note="Description of Artificial Sequence: Synthetic peptide"
FENDAQAPKS

SEQ ID NO: 718 - protein, 10 aa, Artificial Sequence
  source: /note="Description of Artificial Sequence: Synthetic peptide"
LQNDAQAPKS

SEQ ID NO: 719 - protein, 7 aa, Human herpesvirus 6
PRTPPPS

SEQ ID NO: 720 - protein, 10 aa, Homo sapiens
RLFPDFFTRV

SEQ ID NO: 721 - protein, 8 aa, Artificial Sequence
  source: /note="Description of Artificial Sequence: Synthetic peptide"
SIINFEKL

SEQ ID NO: 722 - protein, 9 aa, Artificial Sequence
  source: /note="Description of Artificial Sequence: Synthetic peptide"
KVPRNQDWL

SEQ ID NO: 723 - protein, 597 aa, Artificial Sequence
  source: /note="Description of Artificial Sequence: Synthetic polypeptide"
MSRSVALAVLALLSLSGLEAYMLDLQPETTGGGGSGGGGSGGGGSIQRTPKIQVYSRHPAENGKSNFLNCYVSGFHPSDIEVDLLKNGERIEKVEHSDLSFSKDWSFYLLYYTEFTPTEKDEYACRVNHVTLSQPKIVKWDRDMGGGGSGGGGSGGGGSGGGGSGSHSMRYFFTSVSRPGRGEPRFIAVGYVDDTQFVRFDSDAASQRMEPRAPWIEQEGPEYWDGETRKVKAHSQTHRVDLGTLRGYYNQSEAGSHTVQRMYGCDVGSDWRFLRGYHQYAYDGKDYIALKEDLRSWTAADMAAQTTKHKWEAAHVAEQLRAYLEGTCVEWLRRYLENGKETLQRTDAPKTHMTHHAVSDHEATLRCWALSFYPAEITLTWQRDGEDQTQDTELVETRPAGDGTFQKWAAVVVPSGQEQRYTCHVQHEGLPKPLTLRWEPSSQPTIPIGSGSGSGSEDGSGSGSGSLSTTEVAMHTSTSSSVTKSYISSQTNDTHKRDTYAATPRAHEVSEISVRTVYPPEEETGERVQLAHHFSEPEITLIIFGVMAGVIGTILLISYGIRRLIKKSPSDVKPLPSPDTDVPLSSVEIENPETSDQ

SEQ ID NO: 724 - protein, 597 aa, Artificial Sequence
  source: /note="Description of Artificial Sequence: Synthetic polypeptide"
MSRSVALAVLALLSLSGLEAYMLDLQPETTGGGGSGGGGSGGGGSIQRTPKIQVYSRHPAENGKSNFLNCYVSGFHPSDIEVDLLKNGERIEKVEHSDLSFSKDWSFYLLYYTEFTPTEKDEYACRVNHVTLSQPKIVKWDRDMGGGGSGGGGSGGGGSGGGGSGSHSMRYFFTSVSRPGRGEPRFIAVGYVDDTQFVRFDSDAASQRMEPRAPWIEQEGPEYWDGETRKVKAHSQTHRVDLGTLRGAYNQSEAGSHTVQRMYGCDVGSDWRFLRGYHQYAYDGKDYIALKEDLRSWTAADMAAQTTKHKWEAAHVAEQLRAYLEGTCVEWLRRYLENGKETLQRTDAPKTHMTHHAVSDHEATLRCWALSFYPAEITLTWQRDGEDQTQDTELVETRPAGDGTFQKWAAVVVPSGQEQRYTCHVQHEGLPKPLTLRWEPSSQPTIPIGSGSGSGSEDGSGSGSGSLSTTEVAMHTSTSSSVTKSYISSQTNDTHKRDTYAATPRAHEVSEISVRTVYPPEEETGERVQLAHHFSEPEITLIIFGVMAGVIGTILLISYGIRRLIKKSPSDVKPLPSPDTDVPLSSVEIENPETSDQ

SEQ ID NO: 725 - protein, 597 aa, Artificial Sequence
  source: /note="Description of Artificial Sequence: Synthetic polypeptide"
MSRSVALAVLALLSLSGLEAYMLDLQPETTGCGGSGGGGSGGGGSIQRTPKIQVYSRHPAENGKSNFLNCYVSGFHPSDIEVDLLKNGERIEKVEHSDLSFSKDWSFYLLYYTEFTPTEKDEYACRVNHVTLSQPKIVKWDRDMGGGGSGGGGSGGGGSGGGGSGSHSMRYFFTSVSRPGRGEPRFIAVGYVDDTQFVRFDSDAASQRMEPRAPWIEQEGPEYWDGETRKVKAHSQTHRVDLGTLRGCYNQSEAGSHTVQRMYGCDVGSDWRFLRGYHQYAYDGKDYIALKEDLRSWTAADMAAQTTKHKWEAAHVAEQLRAYLEGTCVEWLRRYLENGKETLQRTDAPKTHMTHHAVSDHEATLRCWALSFYPAEITLTWQRDGEDQTQDTELVETRPAGDGTFQKWAAVVVPSGQEQRYTCHVQHEGLPKPLTLRWEPSSQPTIPIGSGSGSGSEDGSGSGSGSLSTTEVAMHTSTSSSVTKSYISSQTNDTHKRDTYAATPRAHEVSEISVRTVYPPEEETGERVQLAHHFSEPEITLIIFGVMAGVIGTILLISYGIRRLIKKSPSDVKPLPSPDTDVPLSSVEIENPETSDQ

SEQ ID NO: 726 - protein, 596 aa, Artificial Sequence
  source: /note="Description of Artificial Sequence: Synthetic polypeptide"
MSRSVALAVLALLSLSGLEAYMLDLQPETGGGGSGGGGSGGGGSIQRTPKIQVYSRHPAENGKSNFLNCYVSGFHPSDIEVDLLKNGERIEKVEHSDLSFSKDWSFYLLYYTEFTPTEKDEYACRVNHVTLSQPKIVKWDRDMGGGGSGGGGSGGGGSGGGGSGSHSMRYFFTSVSRPGRGEPRFIAVGYVDDTQFVRFDSDAASQRMEPRAPWIEQEGPEYWDGETRKVKAHSQTHRVDLGTLRGYYNQSEAGSHTVQRMYGCDVGSDWRFLRGYHQYAYDGKDYIALKEDLRSWTAADMAAQTTKHKWEAAHVAEQLRAYLEGTCVEWLRRYLENGKETLQRTDAPKTHMTHHAVSDHEATLRCWALSFYPAEITLTWQRDGEDQTQDTELVETRPAGDGTFQKWAAVVVPSGQEQRYTCHVQHEGLPKPLTLRWEPSSQPTIPIGSGSGSGSEDGSGSGSGSLSTTEVAMHTSTSSSVTKSYISSQTNDTHKRDTYAATPRAHEVSEISVRTVYPPEEETGERVQLAHHFSEPEITLIIFGVMAGVIGTILLISYGIRRLIKKSPSDVKPLPSPDTDVPLSSVEIENPETSDQ

SEQ ID NO: 727 - protein, 150 aa, Artificial Sequence [sequence omitted]

SEQ ID NO: 728 - protein, 131 aa, Artificial Sequence
  source: /note="Description of Artificial Sequence: Synthetic polypeptide"
LSTTEVAMHTSTSSSVTKSYISSQTNDTHKRDTYAATPRAHEVSEISVRTVYPPEEETGERVQLAHHFSEPEITLIIFGVMAGVIGTILLISYGIRRLIKKSPSDVKPLPSPDTDVPLSSVEIENPETSDQ

SEQ ID NO: 729 - protein, 78 aa, Artificial Sequence
  source: /note="Description of Artificial Sequence: Synthetic polypeptide"
MQPQESHVHYSRWEDGSRDGVSLGAVSSTEEASRCRRISQRLCTGKLGIAMKVLGGVALFWIIFILGYLTGYYVHKCK

SEQ ID NO: 730 - protein, 20 aa, Artificial Sequence
  source: /note="Description of Artificial Sequence: Synthetic peptide"
MSRSVALAVLALLSLSGLEA

SEQ ID NO: 731 - protein, 19 aa, Artificial Sequence
  source: /note="Description of Artificial Sequence: Synthetic peptide"
MYGKIIFVLLLSEIVSISA

SEQ ID NO: 732 - protein, 15 aa, Artificial Sequence
  source: /note="Description of Artificial Sequence: Synthetic peptide"
GGGGSGGGGSGGGGS

SEQ ID NO: 733 - protein, 20 aa, Artificial Sequence
  source: /note="Description of Artificial Sequence: Synthetic peptide"
GGGGSGGGGSGGGGSGGGGS

SEQ ID NO: 734 - protein, 18 aa, Artificial Sequence
  source: /note="Description of Artificial Sequence: Synthetic peptide"
GSGSGSGSEDGSGSGSGS

SEQ ID NO: 735 - protein, 18 aa, Artificial Sequence
  source: /note="Description of Artificial Sequence: Synthetic peptide"
GSGSGSGSGSGSGSGSGS

SEQ ID NO: 736 - protein, 15 aa, Artificial Sequence
  source: /note="Description of Artificial Sequence: Synthetic peptide"
GCGGSGGGGSGGGGS

SEQ ID NO: 737 - protein, 24 aa, Artificial Sequence
  source: /note="Description of Artificial Sequence: Synthetic peptide"
GGSGGSGGGGGSGGGSGGGSGGGS

SEQ ID NO: 738 - protein, 26 aa, Artificial Sequence
  source: /note="Description of Artificial Sequence: Synthetic peptide"
SGRGGGGSGGGGSGGGGSGGGGSSPA

SEQ ID NO: 739 - protein, 24 aa, Artificial Sequence
  source: /note="Description of Artificial Sequence: Synthetic peptide"
GGGGSGGGGSGGGGSGGGGSGGGG

SEQ ID NO: 740 - protein, 58 aa, Artificial Sequence
  source: /note="Description of Artificial Sequence: Synthetic polypeptide"
SGRGASSGSSGSGSQKKPRYEIRWKVVVISAILALVVLTVISLIILIMLWGSGMQSPA

SEQ ID NO: 741 - protein, 365 aa, Homo sapiens
MAVMAPRTLLLLLSGALALTQTWAGSHSMRYFFTSVSRPGRGEPRFIAVGYVDDTQFVRFDSDAASQKMEPRAPWIEQEGPEYWDQETRNMKAHSQTDRANLGTLRGYYNQSEDGSHTIQIMYGCDVGPDGRFLRGYRQDAYDGKDYIALNEDLRSWTAADMAAQITKRKWEAVHAAEQRRVYLEGRCVDGLRRYLENGKETLQRTDPPKTHMTHHPISDHEATLRCWALGFYPAEITLTWQRDGEDQTQDTELVETRPAGDGTFQKWAAVVVPSGEEQRYTCHVQHEGLPKPLTLRWELSSQPTIPIVGIIAGLVLLGAVITGAVVAAVMWRRKSSDRKGGSYTQAASSDSAQGSDVSLTACKV

SEQ ID NO: 742 - protein, 365 aa, Homo sapiens [sequence omitted]

SEQ ID NO: 743 - protein, 365 aa, Homo sapiens
MAVMAPRTLLLLLSGALALTQTWAGSHSMRYFFTSVSRPGRGEPRFIAVGYVDDTQFVRFDSDAASQRMEPRAPWIEQEGPEYWDQETRNVKAQSQTDRVDLGTLRGYYNQSEAGSHTIQIMYGCDVGSDGRFLRGYRQDAYDGKDYIALNEDLRSWTAADMAAQITKRKWEAAHEAEQLRAYLDGTCVEWLRRYLENGKETLQRTDPPKTHMTHHPISDHEATLRCWALGFYPAEITLTWQRDGEDQTQDTELVETRPAGDGTFQKWAAVVVPSGEEQRYTCHVQHEGLPKPLTLRWELSSQPTIPIVGIIAGLVLLGAVITGAVVAAVMWRRKSSDRKGGSYTQAASSDSAQGSDVSLTACKV

SEQ ID NO: 744 - protein, 365 aa, Homo sapiens [sequence omitted]

SEQ ID NO: 745 - protein, 365 aa, Homo sapiens
MAVMAPRTLLLLLSGALALTQTWAGSHSMRYFYTSVSRPGRGEPRFIAVGYVDDTQFVRFDSDAASQRMEPRAPWIEQEGPEYWDQETRNVKAQSQTDRVDLGTLRGYYNQSEDGSHTIQIMYGCDVGPDGRFLRGYRQDAYDGKDYIALNEDLRSWTAADMAAQITKRKWEAAHAAEQQRAYLEGRCVEWLRRYLENGKETLQRTDPPKTHMTHHPISDHEATLRCWALGFYPAEITLTWQRDGEDQTQDTELVETRPAGDGTFQKWAAVVVPSGEEQRYTCHVQHEGLPKPLTLRWELSSQPTIPIVGIIAGLVLLGAVITGAVVAAVMWRRKSSDRKGGSYTQAASSDSAQGSDVSLTACKV

SEQ ID NO: 746 - protein, 365 aa, Homo sapiens
MAVMAPRTLLLLLLGALALTQTWAGSHSMRYFTTSVSRPGRGEPRFIAVGYVDDTQFVRFDSDAASQRMEPRAPWIEQEGPEYWDLQTRNVKAQSQTDRANLGTLRGYYNQSEAGSHTIQMMYGCDVGSDGRFLRGYRQDAYDGKDYIALNEDLRSWTAADMAAQITQRKWEAARVAEQLRAYLEGTCVEWLRRYLENGKETLQRTDAPKTHMTHHAVSDHEATLRCWALSFYPAEITLTWQRDGEDQTQDTELVETRPAGDGTFQKWASVVVPSGQEQRYTCHVQHEGLPKPLTLRWEPSSQPTIPIVGIIAGLVLFGAVFAGAVVAAVRWRRKSSDRKGGSYSQAASSDSAQGSDMSLTACKV

SEQ ID NO: 747 - protein, 365 aa, Homo sapiens
MAVMAPRTLLLLLLGALALTQTWAGSHSMRYFFTSVSRPGRGEPRFIAVGYVDDTQFVRFDSDAASQRMEPRAPWIEQEGPEYWDQETRNVKAHSQTDRESLRIALRYYNQSEAGSHTIQMMYGCDVGPDGRLLRGYQQDAYDGKDYIALNEDLRSWTAADMAAQITQRKWEAARVAEQLRAYLEGTCVEWLRRYLENGKETLQRTDAPKTHMTHHAVSDHEATLRCWALSFYPAEITLTWQRDGEDQTQDTELVETRPAGDGTFQKWASVVVPSGQEQRYTCHVQHEGLPKPLTLRWEPSSQPTIPIVGIIAGLVLFGAMFAGAVVAAVRWRRKSSDRKGGSYSQAASSDSAQGSDMSLTACKV

SEQ ID NO: 748 - protein, 365 aa, Homo sapiens [sequence omitted]

SEQ ID NO: 749 - protein, 365 aa, Homo sapiens [sequence omitted]

SEQ ID NO: 750 - protein, 365 aa, Homo sapiens
MAVMAPRTLVLLLSGALALTQTWAGSHSMRYFYTSVSRPGRGEPRFIAVGYVDDTQFVRFDSDAASQRMEPRAPWIEQEGPEYWDRNTRNVKAHSQTDRESLRIALRYYNQSEDGSHTIQRMYGCDVGPDGRFLRGYQQDAYDGKDYIALNEDLRSWTAADMAAQITQRKWETAHEAEQWRAYLEGRCVEWLRRYLENGKETLQRTDAPKTHMTHHAVSDHEATLRCWALSFYPAEITLTWQRDGEDQTQDTELVETRPAGDGTFQKWASVVVPSGQEQRYTCHVQHEGLPKPLTLRWEPSSQPTIPIVGIIAGLVLFGAVIAGAVVAAVMWRRKSSDRKGGSYSQAASSDSAQGSDMSLTACKV

SEQ ID NO: 751 - protein, 365 aa, Homo sapiens
MAVMAPRTLVLLLSGALALTQTWAGSHSMRYFYTSVSRPGRGEPRFIAVGYVDDTQFVRFDSDAASQRMEPRAPWIEQEGPEYWDRNTRNVKAHSQTDRANLGTLRGYYNQSEDGSHTIQRMYGCDVGPDGRFLRGYQQDAYDGKDYIALNEDLRSWTAADMAAQITQRKWETAHEAEQWRAYLEGRCVEWLRRYLENGKETLQRTDAPKTHMTHHAVSDHEATLRCWALSFYPAEITLTWQRDGEDQTQDTELVETRPAGDGTFQKWASVVVPSGQEQRYTCHVQHEGLPKPLTLRWEPSSQPTIPIVGIIAGLVLFGAVIAGAVVAAVMWRRKSSDRKGGSYSQAASSDSAQGSDMSLTACKV

SEQ ID NO: 752 - protein, 365 aa, Homo sapiens [sequence omitted]

SEQ ID NO: 753 - protein, 365 aa, Homo sapiens [sequence omitted]

SEQ ID NO: 754 - protein, 366 aa, Homo sapiens
MRVMAPRALLLLLSGGLALTETWACSHSMRYFDTAVSRPGRGEPRFISVGYVDDTQFVRFDSDAASPRGEPRAPWVEQEGPEYWDRETQNYKRQAQADRVSLRNLRGYYNQSEDGSHTLQRMYGCDLGPDGRLLRGYDQSAYDGKDYIALNEDLRSWTAADTAAQITQRKLEAARAAEQLRAYLEGTCVEWLRRYLENGKETLQRAEPPKTHVTHHPLSDHEATLRCWALGFYPAEITLTWQRDGEDQTQDTELVETRPAGDGTFQKWAAVVVPSGQEQRYTCHMQHEGLQEPLTLSWEPSSQPTIPIMGIVAGLAVLVVLAVLGAVVTAMMCRRKSSGGKGGSCSQAACSNSAQGSDESLITCKA

SEQ ID NO: 755 - protein, 366 aa, Homo sapiens
MRVMAPRALLLLLSGGLALTETWACSHSMRYFDTAVSRPGRGEPRFISVGYVDDTQFVRFDSDAASPRGEPRAPWVEQEGPEYWDRETQKYKRQAQADRVSLRNLRGYYNQSEDGSHTLQRMSGCDLGPDGRLLRGYDQSAYDGKDYIALNEDLRSWTAADTAAQITQRKLEAARAAEQLRAYLEGTCVEWLRRYLENGKETLQRAEPPKTHVTHHPLSDHEATLRCWALGFYPAEITLTWQRDGEDQTQDTELVETRPAGDGTFQKWAAVVVPSGQEQRYTCHMQHEGLQEPLTLSWEPSSQPTIPIMGIVAGLAVLVVLAVLGAVVTAMMCRRKSSGGKGGSCSQAACSNSAQGSDESLITCKA

SEQ ID NO: 756 - protein, 366 aa, Homo sapiens
MRVMAPRTLILLLSGALALTETWACSHSMRYFYTAVSRPGRGEPRFIAVGYVDDTQFVQFDSDAASPRGEPRAPWVEQEGPEYWDRETQKYKRQAQTDRVNLRKLRGYYNQSEAGSHTLQRMYGCDLGPDGRLLRGYNQFAYDGKDYIALNEDLRSWTAADKAAQITQRKWEAAREAEQRRAYLEGTCVEWLRRYLENGKKTLQRAEHPKTHVTHHPVSDHEATLRCWALGFYPAEITLTWQRDGEDQTQDTELVETRPAGDGTFQKWAAVVVPSGEEQRYTCHVQHEGLPEPLTLRWGPSSQPTIPIVGIVAGLAVLAVLAVLGAVMAVVMCRRKSSGGKGGSCSQAASSNSAQGSDESLIACKA

SEQ ID NO: 757 - protein, 366 aa, Homo sapiens
MRVMAPRTLILLLSGALALTETWACSHSMRYFDTAVSRPGRGEPRFISVGYVDDTQFVRFDSDAASPRGEPRAPWVEQEGPEYWDRETQKYKRQAQADRVNLRKLRGYYNQSEDGSHTLQWMYGCDLGPDGRLLRGYDQSAYDGKDYIALNEDLRSWTAADTAAQITQRKWEAAREAEQWRAYLEGTCVEWLRRYLENGKETLQRAEHPKTHVTHHPVSDHEATLRCWALGFYPAEITLTWQRDGEDQTQDTELVETRPAGDGTFQKWAAVVVPSGEEQRYTCHVQHEGLPEPLTLRWEPSSQPTIPIVGIVAGLAVLAVLAVLGAVMAVVMCRRKSSGGKGGSCSQAASSNSAQGSDESLIACKA

SEQ ID NO: 758 - protein, 366 aa, Homo sapiens
MRVMAPRTLILLLSGALALTETWAGSHSMRYFSTSVSWPGRGEPRFIAVGYVDDTQFVRFDSDAASPRGEPREPWVEQEGPEYWDRETQKYKRQAQADRVNLRKLRGYYNQSEDGSHTLQRMFGCDLGPDGRLLRGYNQFAYDGKDYIALNEDLRSWTAADTAAQITQRKWEAAREAEQRRAYLEGTCVEWLRRYLENGKETLQRAEHPKTHVTHHPVSDHEATLRCWALGFYPAEITLTWQWDGEDQTQDTELVETRPAGDGTFQKWAAVVVPSGEEQRYTCHVQHEGLPEPLTLRWKPSSQPTIPIVGIVAGLAVLAVLAVLGAMVAVVMCRRKSSGGKGGSCSQAASSNSAQGSDESLIACKA

SEQ ID NO: 759 - protein, 366 aa, Homo sapiens
MRVMAPRTLILLLSGALALTETWAGSHSMRYFYTAVSRPGRGEPHFIAVGYVDDTQFVRFDSDAASPRGEPRAPWVEQEGPEYWDRETQKYKRQAQTDRVSLRNLRGYYNQSEAGSHIIQRMYGCDVGPDGRLLRGYDQYAYDGKDYIALNEDLRSWTAADTAAQITQRKWEAAREAEQLRAYLEGLCVEWLRRYLKNGKETLQRAEHPKTHVTHHPVSDHEATLRCWALGFYPAEITLTWQWDGEDQTQDTELVETRPAGDGTFQKWAAVVVPSGEEQRYTCHVQHEGLPEPLTLRWEPSSQPTIPIVGIVAGLAVLAVLAVLGAVVAVVMCRRKSSGGKGGSCSQAASSNSAQGSDESLIACKA

SEQ ID NO: 760 - protein, 366 aa, Homo sapiens [sequence omitted]

SEQ ID NO: 761 - protein, 366 aa, Homo sapiens [sequence omitted]

SEQ ID NO: 762 - protein, 366 aa, Homo sapiens
MRVMAPRTLILLLSGALALTETWACSHSMRYFYTAVSRPGRGEPRFIAVGYVDDTQFVRFDSDAASPRGEPRAPWVEQEGPEYWDRETQKYKRQAQTDRVSLRNLRGYYNQSEAGSHTLQWMYGCDLGPDGRLLRGYDQSAYDGKDYIALNEDLRSWTAADTAAQITQRKWEAARAAEQQRAYLEGTCVEWLRRYLENGKETLQRAEHPKTHVTHHLVSDHEATLRCWALGFYPAEITLTWQRDGEDQTQDTELVETRPAGDGTFQKWAAVVVPSGEEQRYTCHVQHEGLPEPLTLRWEPSSQPTIPIVGIVAGLAVLAVLAVLGAVVAVVMCRRKSSGGKGGSCSQAASSNSAQGSDESLIACKA

SEQ ID NO: 763 - protein, 366 aa, Homo sapiens [sequence omitted]

SEQ ID NO: 764 - protein, 366 aa, Homo sapiens [sequence omitted]

SEQ ID NO: 765 - protein, 366 aa, Homo sapiens
MRVMAPRTLILLLSGALALTETWACSHSMKYFFTSVSRPGRGEPRFISVGYVDDTQFVRFDSDAASPRGEPRAPWVEQEGPEYWDRETQKYKRQAQTDRVSLRNLRGYYNQSEAGSHTLQWMCGCDLGPDGRLLRGYDQYAYDGKDYIALNEDLRSWTAADTAAQITQRKWEAAREAEQRRAYLEGTCVEWLRRYLENGKETLQRAEHPKTHVTHHPVSDHEATLRCWALGFYPAEITLTWQWDGEDQTQDTELVETRPAGDGTFQKWAAVMVPSGEEQRYTCHVQHEGLPEPLTLRWEPSSQPTIPIVGIVAGLAVLAVLAVLGAVVAVVMCRRKSSGGKGGSCSQAASSNSAQGSDESLIACKA

SEQ ID NO: 766 - protein, 366 aa, Homo sapiens [sequence omitted]

SEQ ID NO: 767 - protein, 366 aa, Homo sapiens [sequence omitted]

SEQ ID NO: 768 - protein, 366 aa, Homo sapiens [sequence omitted]

SEQ ID NO: 769 - protein, 362 aa, Homo sapiens
MLVMAPRTVLLLLSAALALTETWAGSHSMRYFDTAMSRPGRGEPRFISVGYVDDTQFVRFDSDAASPREEPRAPWIEQEGPEYWDRNTQIFKTNTQTDRESLRNLRGYYNQSEAGSHTLQSMYGCDVGPDGRLLRGHNQYAYDGKDYIALNEDLRSWTAADTAAQITQRKWEAARVAEQDRAYLEGTCVEWLRRYLENGKDTLERADPPKTHVTHHPISDHEATLRCWALGFYPAEITLTWQRDGEDQTQDTELVETRPAGDRTFQKWAAVVVPSGEEQRYTCHVQHEGLPKPLTLRWEPSSQSTVPIVGIVAGLAVLAVVVIGAVVAAVMCRRKSSGGKGGSYSQAACSDSAQGSDVSLTA

SEQ ID NO: 770 - protein, 362 aa, Homo sapiens
MLVMAPRTVLLLLSAALALTETWAGSHSMRYFYTSVSRPGRGEPRFISVGYVDDTQFVRFDSDAASPREEPRAPWIEQEGPEYWDRNTQIYKAQAQTDRESLRNLRGYYNQSEAGSHTLQSMYGCDVGPDGRLLRGHDQYAYDGKDYIALNEDLRSWTAADTAAQITQRKWEAAREAEQRRAYLEGECVEWLRRYLENGKDKLERADPPKTHVTHHPISDHEATLRCWALGFYPAEITLTWQRDGEDQTQDTELVETRPAGDRTFQKWAAVVVPSGEEQRYTCHVQHEGLPKPLTLRWEPSSQSTVPIVGIVAGLAVLAVVVIGAVVAAVMCRRKSSGGKGGSYSQAACSDSAQGSDVSLTA

SEQ ID NO: 771 - protein, 362 aa, Homo sapiens
MRVTAPRTLLLLLWGAVALTETWAGSHSMRYFYTAMSRPGRGEPRFITVGYVDDTLFVRFDSDATSPRKEPRAPWIEQEGPEYWDRETQISKTNTQTYRENLRTALRYYNQSEAGSHIIQRMYGCDVGPDGRLLRGYDQDAYDGKDYIALNEDLSSWTAADTAAQITQRKWEAARVAEQDRAYLEGLCVESLRRYLENGKETLQRADPPKTHVTHHPISDHEVTLRCWALGFYPAEITLTWQRDGEDQTQDTELVETRPAGDRTFQKWAAVVVPSGEEQRYTCHVQHEGLPKPLTLRWEPSSQSTVPIVGIVAGLAVLAVVVIGAVVAAVMCRRKSSGGKGGSYSQAACSDSAQGSDVSLTA

SEQ ID NO: 772 - protein, 362 aa, Homo sapiens
MRVTAPRTVLLLLSGALALTETWAGSHSMRYFYTAMSRPGRGEPRFIAVGYVDDTQFVRFDSDAASPRMAPRAPWIEQEGPEYWDRETQISKTNTQTYRESLRNLRGYYNQSEAGSHTLQRMYGCDVGPDGRLLRGHDQSAYDGKDYIALNEDLSSWTAADTAAQITQRKWEAAREAEQWRAYLEGLCVEWLRRYLENGKETLQRADPPKTHVTHHPISDHEATLRCWALGFYPAEITLTWQRDGEDQTQDTELVETRPAGDRTFQKWAAVVVPSGEEQRYTCHVQHEGLPKPLTLRWEPSSQSTIPIVGIVAGLAVLAVVVIGAVVATVMCRRKSSGGKGGSYSQAASSDSAQGSDVSLTA

SEQ ID NO: 773 - protein, 362 aa, Homo sapiens [sequence omitted]

SEQ ID NO: 774 - protein, 362 aa, Homo sapiens
MRVTAPRTLLLLLWGAVALTETWAGSHSMRYFYTAMSRPGRGEPRFITVGYVDDTLFVRFDSDATSPRKEPRAPWIEQEGPEYWDRETQISKTNTQTYRENLRTALRYYNQSEAGSHIIQRMYGCDVGPDGRLLRGYDQDAYDGKDYIALNEDLSSWTAADTAAQITQRKWEAARVAEQLRAYLEGLCVESLRRYLENGKETLQRADPPKTHVTHHPISDHEVTLRCWALGFYPAEITLTWQRDGEDQTQDTELVETRPAGDRTFQKWAAVVVPSGEEQRYTCHVQHEGLPKPLTLRWEPSSQSTVPIVGIVAGLAVLAVVVIGAVVAAVMCRRKSSGGKGGSYSQAACSDSAQGSDVSLTA

SEQ ID NO: 775 - protein, 362 aa, Homo sapiens [sequence omitted]

SEQ ID NO: 776 - protein, 362 aa, Homo sapiens [sequence omitted]

SEQ ID NO: 777 - protein, 362 aa, Homo sapiens [sequence omitted]

SEQ ID NO: 778 - protein, 362 aa, Homo sapiens [sequence omitted]

SEQ ID NO: 779 - protein, 362 aa, Homo sapiens
MRVTAPRTLLLLLWGAVALTETWAGSHSMRYFHTSVSRPGRGEPRFISVGYVDGTQFVRFDSDAASPRTEPRAPWIEQEGPEYWDRNTQISKTNTQTYRESLRNLRGYYNQSEAGSHTLQRMYGCDVGPDGRLLRGHDQSAYDGKDYIALNEDLSSWTAADTAAQITQRKWEAARVAEQLRAYLEGTCVEWLRRHLENGKETLQRADPPKTHVTHHPISDHEATLRCWALGFYPAEITLTWQRDGEDQTQDTELVETRPAGDRTFQKWAAVVVPSGEEQRYTCHVQHEGLPKPLTLRWEPSSQSTIPIVGIVAGLAVLAVVVIGAVVATVMCRRKSSGGKGGSYSQAASSDSAQGSDVSLTA

SEQ ID NO: 780 - protein, 362 aa, Homo sapiens
MLVMAPRTVLLLLSAALALTETWAGSHSMRYFYTAVSRPGRGEPRFISVGYVDDTQFVRFDSDAASPREEPRAPWIEQEGPEYWDRNTQICKTNTQTDRESLRNLRGYYNQSEAGSHTLQWMYGCDVGPDGRLLRGYNQFAYDGKDYIALNEDLSSWTAADTAAQITQRKWEAAREAEQLRAYLEGTCVEWLRRHLENGKETLQRADPPKTHVTHHPISDHEATLRCWALGFYPAEITLTWQRDGEDQTQDTELVETRPAGDRTFQKWAAVVVPSGEEQRYTCHVQHEGLPKPLTLRWEPSSQSTVPIVGIVAGLAVLAVVVIGAVVAAVMCRRKSSGGKGGSYSQAASSDSAQGSDVSLTA

SEQ ID NO: 781 - protein, 362 aa, Homo sapiens
MRVTAPRTLLLLLWGAVALTETWAGSHSMRYFYTAMSRPGRGEPRFITVGYVDDTQFVRFDSDATSPRMAPRAPWIEQEGPEYWDRETQISKTNTQTYRENLRTALRYYNQSEAGSHTWQTMYGCDLGPDGRLLRGHNQLAYDGKDYIALNEDLSSWTAADTAAQITQLKWEAARVAEQLRAYLEGECVEWLRRYLENGKETLQRADPPKTHVTHHPISDHEATLRCWALGFYPAEITLTWQRDGEDQTQDTELVETRPAGDRTFQKWAAVVVPSGEEQRYTCHVQHEGLPKPLTLRWEPSSQSTVPIVGIVAGLAVLAVVVIGAVVAAVMCRRKSSGGKGGSYSQAACSDSAQGSDVSLTA

SEQ ID NO: 782 - protein, 362 aa, Homo sapiens [sequence omitted]

SEQ ID NO: 783 - protein, 362 aa, Homo sapiens [sequence omitted]

SEQ ID NO: 784 - protein, 362 aa, Homo sapiens [sequence omitted]

SEQ ID NO: 785 - protein, 362 aa, Homo sapiens [sequence omitted]

SEQ ID NO: 786 - protein, 362 aa, Homo sapiens [sequence omitted]

SEQ ID NO: 787 - protein, 362 aa, Homo sapiens [sequence omitted]

SEQ ID NO: 788 - protein, 362 aa, Homo sapiens [sequence omitted]

SEQ ID NO: 789 - protein, 362 aa, Homo sapiens [sequence omitted]

SEQ ID NO: 790 - protein, 266 aa, Homo sapiens
MVCLKLPGGSCMAALTVTLMVLSSPLALAGDTQPRFLWQGKYKCHFFNGTERVQFLERLFYNQEEFVRFDSDVGEYRAVTELGRPVAESWNSQKDILEDRRGQVDTVCRHNYGVGESFTVQRRVHPEVTVYPAKTQPLQHHNLLVCSVSGFYPGSIEVRWFRNGQEEKAGVVSTGLIQNGDWTFQTLVMLETVPRSGEVYTCQVEHPSVMSPLTVEWRARSESAQSKMLSGVGGFVLGLLFLGAGLFIYFRNQKGHSGLQPTGFLS

SEQ ID NO: 791 - protein, 266 aa, Homo sapiens
MVCLRLPGGSCMAVLTVTLMVLSSPLALAGDTRPRFLEYSTSECHFFNGTERVRYLDRYFHNQEENVRFDSDVGEFRAVTELGRPDAEYWNSQKDLLEQKRGRVDNYCRHNYGVVESFTVQRRVHPKVTVYPSKTQPLQHHNLLVCSVSGFYPGSIEVRWFRNGQEEKTGVVSTGLIHNGDWTFQTLVMLETVPRSGEVYTCQVEHPSVTSPLTVEWRARSESAQSKMLSGVGGFVLGLLFLGAGLFIYFRNQKGHSGLQPRGFLS

SEQ ID NO: 792 - protein, 266 aa, Homo sapiens
MVCLKLPGGSCMTALTVTLMVLSSPLALSGDTRPRFLWQPKRECHFFNGTERVRFLDRYFYNQEESVRFDSDVGEFRAVTELGRPDAEYWNSQKDILEQARAAVDTYCRHNYGVVESFTVQRRVQPKVTVYPSKTQPLQHHNLLVCSVSGFYPGSIEVRWFLNGQEEKAGMVSTGLIQNGDWTFQTLVMLETVPRSGEVYTCQVEHPSVTSPLTVEWRARSESAQSKMLSGVGGFVLGLLFLGAGLFIYFRNQKGHSGLQPTGFLS

SEQ ID NO: 793 - protein, 266 aa, Homo sapiens [sequence omitted]

SEQ ID NO: 794 - protein, 266 aa, Homo sapiens
MVCLKLPGGSCMTALTVTLMVLSSPLALAGDTRPRFLWQLKFECHFFNGTERVRLLERCIYNQEESVRFDSDVGEYRAVTELGRPDAEYWNSQKDLLEQRRAAVDTYCRHNYGVGESFTVQRRVEPKVTVYPSKTQPLQHHNLLVCSVSGFYPGSIEVRWFRNGQEEKAGVVSTGLIQNGDWTFQTLVMLETVPRSGEVYTCQVEHPSVTSPLTVEWRARSESAQSKMLSGVGGFVLGLLFLGAGLFIYFRNQKGHSGLQPTGFLS

SEQ ID NO: 795 - protein, 266 aa, Homo sapiens [sequence omitted]

SEQ ID NO: 796 - protein, 266 aa, Homo sapiens [sequence omitted]

SEQ ID NO: 797 - protein, 266 aa, Homo sapiens [sequence omitted]

SEQ ID NO: 798 - protein, 266 aa, Homo sapiens [sequence omitted]

SEQ ID NO: 799 - protein, 266 aa, Homo sapiens [sequence omitted]

SEQ ID NO: 800 - protein, 266 aa, Homo sapiens [sequence omitted]

SEQ ID NO: 801 - protein, 266 aa, Homo sapiens [sequence omitted]

SEQ ID NO: 802 - protein, 266 aa, Homo sapiens [sequence omitted]

SEQ ID NO: 803 - protein, 266 aa, Homo sapiens [sequence omitted]

SEQ ID NO: 804 - protein, 266 aa, Homo sapiens [sequence omitted]

SEQ ID NO: 805 - protein, 266 aa, Homo sapiens [sequence omitted]

SEQ ID NO: 806 - protein, 254 aa, Homo sapiens
MILNKALMLGALALTTVMSPCGGEDIVADHVASYGVNLYQSYGPSGQYTHEFDGDEQFYVDLGRKETVWCLPVLRQFRFDPQFALTNIAVLKHNLNSLIKRSNSTAATNEVPEVTVFSKSPVTLGQPNILICLVDNIFPPVVNITWLSNGHSVTEGVSETSFLSKSDHSFFKISYLTLLPSAEESYDCKVEHWGLDKPLLKHWEPEIPAPMSELTETVVCALGLSVGLVGIVVGTVFIIRGLRSVGASRHQGPL

SEQ ID NO: 807 - protein, 255 aa, Homo sapiens
MILNKALMLGALALTTVMSPCGGEDIVADHVASYGVNLYQSYGPSGQYSHEFDGDEEFYVDLERKETVWQLPLFRRFRRFDPQFALTNIAVLKHNLNIVIKRSNSTAATNEVPEVTVFSKSPVTLGQPNTLICLVDNIFPPVVNITWLSNGHSVTEGVSETSFLSKSDHSFFKISYLTFLPSADEIYDCKVEHWGLDEPLLKHWEPEIPTPMSELTETVVCALGLSVGLVGIVVGTVLIIRGLRSVGASRHQGPL

SEQ ID NO: 808 - protein, 255 aa, Homo sapiens
MILNKALLLGALALTTVMSPCGGEDIVADHVASCGVNLYQFYGPSGQYTHEFDGDEQFYVDLERKETAWRWPEFSKFGGFDPQGALRNMAVAKHNLNIMIKRYNSTAATNEVPEVTVFSKSPVTLGQPNTLICLVDNIFPPVVNITWLSNGQSVTEGVSETSFLSKSDHSFFKISYLTFLPSADEIYDCKVEHWGLDQPLLKHWEPEIPAPMSELTETVVCALGLSVGLMGIVVGTVFIIQGLRSVGASRHQGPL

SEQ ID NO: 809 - protein, 254 aa, Homo sapiens
MILNKALMLGALALTTVMSPCGGEDIVADHVASYGVNLYQSYGPSGQFTHEFDGDEEFYVDLERKETVWKLPLFHRLRFDPQFALTNIAVLKHNLNILIKRSNSTAATNEVPEVTVFSKSPVTLGQPNTLICLVDNIFPPVVNITWLSNGHSVTEGVSETSFLSKSDHSFFKISYLTFLPSADEIYDCKVEHWGLDEPLLKHWEPEIPAPMSELTETVVCALGLSVGLVGIVVGTVLIIRGLRSVGASRHQGPL

SEQ ID NO: 810 - protein, 255 aa, Homo sapiens [sequence omitted]

SEQ ID NO: 811 - protein, 255 aa, Homo sapiens [sequence omitted]

SEQ ID NO: 812 - protein, 254 aa, Homo sapiens
MILNKALLLGALALTTVMSPCGGEDIVADHVASYGVNLYQSYGPSGQYTHEFDGDEQFYVDLGRKETVWCLPVLRQFRFDPQFALTNIAVTKHNLNILIKRSNSTAATNEVPEVTVFSKSPVTLGQPNTLICLVDNIFPPVVNITWLSNGHSVTEGVSETSFLSKSDHSFFKISYLTFLPSADEIYDCKVEHWGLDEPLLKHWEPEIPAPMSELTETVVCALGLSVGLVGIVVGTVFIIRGLRSVGASRHQGPL

SEQ ID NO: 813 - protein, 261 aa, Homo sapiens
MSWKKALRIPGGLRAATVTLMLAMLSTPVAEGRDSPEDFVYQFKAMCYFTNGTERVRYVTRYIYNREEYARFDSDVEVYRAVTPLGPPDAEYWNSQKEVLERTRAELDTVCRHNYQLELRTTLQRRVEPTVTISPSRTEALNHHNLLVCSVTDFYPAQIKVRWFRNDQEETTGVVSTPLIRNGDWTFQILVMLEMTPQHGDVYTCHVEHPSLQNPITVEWRAQSESAQSKMLSGIGGFVLGLIFLGLGLIIHHRSQKGLLH

SEQ ID NO: 814 - protein, 261 aa, Homo sapiens
MSWKKALRIPGGLRAATVTLMLSMLSTPVAEGRDSPEDFVYQFKGMCYFTNGTERVRLVSRSIYNREEIVRFDSDVGEFRAVTLLGLPAAEYWNSQKDILERKRAAVDRVCRHNYQLELRTTLQRRVEPTVTISPSRTEALNHHNLLVCSVTDFYPAQIKVRWFRNDQEETAGVVSTPLIRNGDWTFQILVMLEMTPQRGDVYTCHVEHPSLQSPITVEWRAQSESAQSKMLSGIGGFVLGLIFLGLGLIIHHRSQKGLLH

SEQ ID NO: 815 - protein, 261 aa, Homo sapiens
MSWKKALRIPGDLRVATVTLMLAMLSSLLAEGRDSPEDFVFQFKGMCYFTNGTERVRLVTRYIYNREEYARFDSDVGVYRAVTPQGRPDAEYWNSQKEVLEGTRAELDTVCRHNYEVAFRGILQRRVEPTVTISPSRTEALNHHNLLVCSVTDFYPGQIKVRWFRNDQEETAGVVSTPLIRNGDWTFQILVMLEMTPQRGDVYTCHVEHPSLQSPITVEWRAQSESAQSKMLSGVGGFVLGLIFLGLGLIIRQRSQKGLLH

SEQ ID NO: 816 - protein, 261 aa, Homo sapiens [sequence omitted]

SEQ ID NO: 817 - protein, 261 aa, Homo sapiens
MSWKKALRIPGGLRAATVTLMLSMLSTPVAEGRDSPEDFVYQFKGMCYFTNGTERVRLVSRSIYNREEIVRFDSDVGEFRAVTLLGLPAAEYWNSQKDILERKRAAVDRVCRHNYQLELRTTLQRRVEPTVTISPSRTEALNHHNLLVCSVTDFYPAQIKVRWFRNGQEETAGVVSTPLIRNGDWTFQILVMLEMTPQRGDVYTCHVEHPSLQSPITVEWRAQSESAQSKMLSGIGGFVLGLIFLGLGLIIHHRSQKGLLH

SEQ ID NO: 818 - protein, 261 aa, Homo sapiens [sequence omitted]

SEQ ID NO: 819 - protein, 261 aa, Homo sapiens [sequence omitted]

SEQ ID NO: 820 - protein, 261 aa, Homo sapiens [sequence omitted]

SEQ ID NO: 821 - protein, 261 aa, Homo sapiens [sequence omitted]

SEQ ID NO: 822 - protein, 269 aa, Homo sapiens [sequence omitted]

SEQ ID NO: 823 - protein, 261 aa, Homo sapiens [sequence omitted]

SEQ ID NO: 824 - protein, 260 aa, Homo sapiens
MRPEDRMFHIRAVILRALSLAFLLSLRGAGAIKADHVSTYAAFVQTHRPTGEFMFEFDEDEMFYVDLDKKETVWHLEEFGQAFSFEAQGGLANIAILNNNLNTLIQRSNHTQATNDPPEVTVFPKEPVELGQPNTLICHIDKFFPPVLNVTWLCNGELVTEGVAESLFLPRTDYSFHKFHYLTFVPSAEDFYDCRVEHWGLDQPLLKHWEAQEPIQMPETTETVLCALGLVLGLVGIIVGTVLIIKSLRSGHDPRAQGTL

SEQ ID NO: 825 - protein, 260 aa, Homo sapiens [sequence omitted]

SEQ ID NO: 826 - protein, 260 aa, Homo sapiens [sequence omitted]

SEQ ID NO: 827 - protein, 258 aa, Homo sapiens
MMVLQVSAAPRTVALTALLMVLLTSVVQGRATPENYLFQGRQECYAFNGTQRFLERYIYNREEFARFDSDVGEFRAVTELGRPAAEYWNSQKDILEEKRAVPDRMCRHNYELGGPMTLQRRVQPRVNVSPSKKGPLQHHNLLVCHVTDFYPGSIQVRWFLNGQEETAGVVSTNLIRNGDWTFQILVMLEMTPQQGDVYTCQVEHTSLDSPVTVEWKAQSDSARSKTLTGAGGFVLGLIICGVGIFMHRRSKKVQRGSA

SEQ ID NO: 828 - protein, 258 aa, Homo sapiens
MMVLQVSAAPRTVALTALLMVLLTSVVQGRATPENYLFQGRQECYAFNGTQRFLERYIYNREEFVRFDSDVGEFRAVTELGRPDEEYWNSQKDILEEERAVPDRMCRHNYELGGPMTLQRRVQPRVNVSPSKKGPLQHHNLLVCHVTDFYPGSIQVRWFLNGQEETAGVVSTNLIRNGDWTFQILVMLEMTPQQGDVYTCQVEHTSLDSPVTVEWKAQSDSARSKTLTGAGGFVLGLIICGVGIFMHRRSKKVQRGSA

SEQ ID NO: 829 - protein, 258 aa, Homo sapiens
MMVLQVSAAPRTVALTALLMVLLTSVVQGRATPENYLFQGRQECYAFNGTQRFLERYIYNREEFVRFDSDVGEFRAVTELGRPDEEYWNSQKDILEEKRAVPDRMCRHNYELGGPMTLQRRVQPRVNVSPSKKGPLQHHNLLVCHVTDFYPGSIQVRWFLNGQEETAGVVSTNLIRNGDWTFQILVMLEMTPQQGDVYTCQVEHTSMDSPVTVEWKAQSDSARSKTLTGAGGFVLGLIICGVGIFMHRRSKKVQRGSA

SEQ ID NO: 830 - protein, 258 aa, Homo sapiens
MMVLQVSAAPRTVALTALLMVLLTSVVQGRATPENYVYQLRQECYAFNGTQRFLERYIYNREEFVRFDSDVGEFRAVTELGRPDEDYWNSQKDLLEEKRAVPDRVCRHNYELDEAVTLQRRVQPKVNVSPSKKGPLQHHNLLVCHVTDFYPGSIQVRWFLNGQEETAGVVSTNLIRNGDWTFQILVMLEMTPQQGDVYICQVEHTSLDSPVTVEWKAQSDSARSKTLTGAGGFVLGLIICGVGIFMHRRSKKVQRGSA

SEQ ID NO: 831 - protein, 258 aa, Homo sapiens [sequence omitted]

SEQ ID NO: 832 - protein, 258 aa, Homo sapiens [sequence omitted]

SEQ ID NO: 833 - protein, 258 aa, Homo sapiens [sequence omitted]

SEQ ID NO: 834 - protein, 258 aa, Homo sapiens [sequence omitted]

SEQ ID NO: 835 - protein, 258 aa, Homo sapiens [sequence omitted]

SEQ ID NO: 836 - protein, 258 aa, Homo sapiens [sequence omitted]

SEQ ID NO: 837 - protein, 258 aa, Homo sapiens [sequence omitted]

SEQ ID NO: 838 - protein, 258 aa, Homo sapiens [sequence omitted]

SEQ ID NO: 839 - protein, 99 aa, Homo sapiens [sequence omitted]

SEQ ID NO: 840 - protein, 284 aa, Homo sapiens
GSHSMRYFFTSVSRPGRGEPRFIAVGYVDDTQFVRFDSDAASQRMEPRAPWIEQEGPEYWDGETRKVKAHSQTHRVDLGTLRGAYNQSEAGSHTVQRMYGCDVGSDWRFLRGYHQYAYDGKDYIALKEDLRSWTAADMAAQTTKHKWEAAHVAEQLRAYLEGTCVEWLRRYLENGKETLQRTDAPKTHMTHHAVSDHEATLRCWALSFYPAEITLTWQRDGEDQTQDTELVETRPAGDGTFQKWAAVVVPSGQEQRYTCHVQHEGLPKPLTLRWEPSSQPTIPI

SEQ ID NO: 841 - protein, 284 aa, Homo sapiens
GSHSMRYFFTSVSRPGRGEPRFIAVGYVDDTQFVRFDSDAASQRMEPRAPWIEQEGPEYWDGETRKVKAHSQTHRVDLGTLRGYYNQSEAGSHTVQRMYGCDVGSDWRFLRGYHQYAYDGKDYIALKEDLRSWTAADMAAQTTKHKWEAAHVAEQLRAYLEGTCVEWLRRYLENGKETLQRTDAPKTHMTHHAVSDHEATLRCWALSFYPAEITLTWQRDGEDQTQDTELVETRPAGDGTFQKWAAVVVPSGQEQRYTCHVQHEGLPKPLTLRWEPSSQPTIPI

SEQ ID NO: 842 - protein, 284 aa, Homo sapiens
GSHSMRYFFTSVSRPGRGEPRFIAVGYVDDTQFVRFDSDAASQRMEPRAPWIEQEGPEYWDGETRKVKAHSQTHRVDLGTLRGCYNQSEAGSHTVQRMYGCDVGSDWRFLRGYHQYAYDGKDYIALKEDLRSWTAADMAAQTTKHKWEAAHVAEQLRAYLEGTCVEWLRRYLENGKETLQRTDAPKTHMTHHAVSDHEATLRCWALSFYPAEITLTWQRDGEDQTQDTELVETRPAGDGTFQKWAAVVVPSGQEQRYTCHVQHEGLPKPLTLRWEPSSQPTIPI

SEQ ID NO: 843 - protein, 465 aa, Artificial Sequence
  source: /note="Description of Artificial Sequence: Synthetic polypeptide"
MSRSVALAVLALLSLSGLEAYMLDLQPETGGGGSGGGGSGGGGSIQRTPKIQVYSRHPAENGKSNFLNCYVSGFHPSDIEVDLLKNGERIEKVEHSDLSFSKDWSFYLLYYTEFTPTEKDEYACRVNHVTLSQPKIVKWDRDMGGGGSGGGGSGGGGSGGGGSGSHSMRYFFTSVSRPGRGEPRFIAVGYVDDTQFVRFDSDAASQRMEPRAPWIEQEGPEYWDGETRKVKAHSQTHRVDLGTLRGYYNQSEAGSHTVQRMYGCDVGSDWRFLRGYHQYAYDGKDYIALKEDLRSWTAADMAAQTTKHKWEAAHVAEQLRAYLEGTCVEWLRRYLENGKETLQRTDAPKTHMTHHAVSDHEATLRCWALSFYPAEITLTWQRDGEDQTQDTELVETRPAGDGTFQKWAAVVVPSGQEQRYTCHVQHEGLPKPLTLRWEPSSQPTIPIGSGSGSGSEDGSGSGSGS

SEQ ID NO: 844 - protein, 465 aa, Artificial Sequence
  source: /note="Description of Artificial Sequence: Synthetic polypeptide"
MSRSVALAVLALLSLSGLEAYMLDLQPETGGGGSGGGGSGGGGSIQRTPKIQVYSRHPAENGKSNFLNCYVSGFHPSDIEVDLLKNGERIEKVEHSDLSFSKDWSFYLLYYTEFTPTEKDEYACRVNHVTLSQPKIVKWDRDMGGGGSGGGGSGGGGSGGGGSGSHSMRYFFTSVSRPGRGEPRFIAVGYVDDTQFVRFDSDAASQRMEPRAPWIEQEGPEYWDGETRKVKAHSQTHRVDLGTLRGAYNQSEAGSHTVQRMYGCDVGSDWRFLRGYHQYAYDGKDYIALKEDLRSWTAADMAAQTTKHKWEAAHVAEQLRAYLEGTCVEWLRRYLENGKETLQRTDAPKTHMTHHAVSDHEATLRCWALSFYPAEITLTWQRDGEDQTQDTELVETRPAGDGTFQKWAAVVVPSGQEQRYTCHVQHEGLPKPLTLRWEPSSQPTIPIGSGSGSGSEDGSGSGSGS

SEQ ID NO: 845 - protein, 465 aa, Artificial Sequence
  source: /note="Description of Artificial Sequence: Synthetic polypeptide"
MSRSVALAVLALLSLSGLEAYMLDLQPETGCGGSGGGGSGGGGSIQRTPKIQVYSRHPAENGKSNFLNCYVSGFHPSDIEVDLLKNGERIEKVEHSDLSFSKDWSFYLLYYTEFTPTEKDEYACRVNHVTLSQPKIVKWDRDMGGGGSGGGGSGGGGSGGGGSGSHSMRYFFTSVSRPGRGEPRFIAVGYVDDTQFVRFDSDAASQRMEPRAPWIEQEGPEYWDGETRKVKAHSQTHRVDLGTLRGCYNQSEAGSHTVQRMYGCDVGSDWRFLRGYHQYAYDGKDYIALKEDLRSWTAADMAAQTTKHKWEAAHVAEQLRAYLEGTCVEWLRRYLENGKETLQRTDAPKTHMTHHAVSDHEATLRCWALSFYPAEITLTWQRDGEDQTQDTELVETRPAGDGTFQKWAAVVVPSGQEQRYTCHVQHEGLPKPLTLRWEPSSQPTIPIGSGSGSGSEDGSGSGSGS

SEQ ID NO: 846 - protein, 596 aa, Artificial Sequence
  source: /note="Description of Artificial Sequence: Synthetic polypeptide"
MSRSVALAVLALLSLSGLEAYMLDLQPETGGGGSGGGGSGGGGSIQRTPKIQVYSRHPAENGKSNFLNCYVSGFHPSDIEVDLLKNGERIEKVEHSDLSFSKDWSFYLLYYTEFTPTEKDEYACRVNHVTLSQPKIVKWDRDMGGGGSGGGGSGGGGSGGGGSGSHSMRYFFTSVSRPGRGEPRFIAVGYVDDTQFVRFDSDAASQRMEPRAPWIEQEGPEYWDGETRKVKAHSQTHRVDLGTLRGAYNQSEAGSHTVQRMYGCDVGSDWRFLRGYHQYAYDGKDYIALKEDLRSWTAADMAAQTTKHKWEAAHVAEQLRAYLEGTCVEWLRRYLENGKETLQRTDAPKTHMTHHAVSDHEATLRCWALSFYPAEITLTWQRDGEDQTQDTELVETRPAGDGTFQKWAAVVVPSGQEQRYTCHVQHEGLPKPLTLRWEPSSQPTIPIGSGSGSGSEDGSGSGSGSLSTTEVAMHTSTSSSVTKSYISSQTNDTHKRDTYAATPRAHEVSEISVRTVYPPEEETGERVQLAHHFSEPEITLIIFGVMAGVIGTILLISYGIRRLIKKSPSDVKPLPSPDTDVPLSSVEIENPETSDQ

SEQ ID NO: 847 - protein, 596 aa, Artificial Sequence
  source: /note="Description of Artificial Sequence: Synthetic polypeptide"
MSRSVALAVLALLSLSGLEAYMLDLQPETGCGGSGGGGSGGGGSIQRTPKIQVYSRHPAENGKSNFLNCYVSGFHPSDIEVDLLKNGERIEKVEHSDLSFSKDWSFYLLYYTEFTPTEKDEYACRVNHVTLSQPKIVKWDRDMGGGGSGGGGSGGGGSGGGGSGSHSMRYFFTSVSRPGRGEPRFIAVGYVDDTQFVRFDSDAASQRMEPRAPWIEQEGPEYWDGETRKVKAHSQTHRVDLGTLRGCYNQSEAGSHTVQRMYGCDVGSDWRFLRGYHQYAYDGKDYIALKEDLRSWTAADMAAQTTKHKWEAAHVAEQLRAYLEGTCVEWLRRYLENGKETLQRTDAPKTHMTHHAVSDHEATLRCWALSFYPAEITLTWQRDGEDQTQDTELVETRPAGDGTFQKWAAVVVPSGQEQRYTCHVQHEGLPKPLTLRWEPSSQPTIPIGSGSGSGSEDGSGSGSGSLSTTEVAMHTSTSSSVTKSYISSQTNDTHKRDTYAATPRAHEVSEISVRTVYPPEEETGERVQLAHHFSEPEITLIIFGVMAGVIGTILLISYGIRRLIKKSPSDVKPLPSPDTDVPLSSVEIENPETSDQ

SEQ ID NO: 848 - protein, 998 aa, Artificial Sequence
  source: /note="Description of Artificial Sequence: Synthetic polypeptide"
MSRSVALAVLALLSLSGLEAYMLDLQPETGGGGSGGGGSGGGGSIQRTPKIQVYSRHPAENGKSNFLNCYVSGFHPSDIEVDLLKNGERIEKVEHSDLSFSKDWSFYLLYYTEFTPTEKDEYACRVNHVTLSQPKIVKWDRDMGGGGSGGGGSGGGGSGGGGSGSHSMRYFFTSVSRPGRGEPRFIAVGYVDDTQFVRFDSDAASQRMEPRAPWIEQEGPEYWDGETRKVKAHSQTHRVDLGTLRGAYNQSEAGSHTVQRMYGCDVGSDWRFLRGYHQYAYDGKDYIALKEDLRSWTAADMAAQTTKHKWEAAHVAEQLRAYLEGTCVEWLRRYLENGKETLQRTDAPKTHMTHHAVSDHEATLRCWALSFYPAEITLTWQRDGEDQTQDTELVETRPAGDGTFQKWAAVVVPSGQEQRYTCHVQHEGLPKPLTLRWEPSSQPTIPIGSGSGSGSEDGSGSGSGSLSTTEVAMHTSTSSSVTKSYISSQTNDTHKRDTYAATPRAHEVSEISVRTVYPPEEETGERVQLAHHFSEPEITLIIFGVMAGVIGTILLISYGIRRLIKKSPSDVKPLPSPDTDVPLSSVEIENPETSDQGSGEGRGSLLTCGDVEENPGPMYGKIIFVLLLSEIVSISAACPWAVSGARASPGSAASPRLREGPELSPDDPAGLLDLRQGMFAQLVAQNVLLIDGPLSWYSDPGLAGVSLTGGLSYKEDTKELVVAKAGVYYVFFQLELRRVVAGEGSGSVSLALHLQPLRSAAGAAALALTVDLPPASSEARNSAFGFQGRLLHLSAGQRLGVHLHTEARARHAWQLTQGATVLGLFRVTPEIPAGLPSPRSEGGSGGSGGGPEDEPGSGSGGGSGGGSLSTTEVAMHTSTSSSVTKSYISSQTNDTHKRDTYAATPRAHEVSEISVRTVYPPEEETGERVQLAHHFSEPEITLIIFGVMAGVIGTILLISYGIRRLIKKSPSDVKPLPSPDTDVPLSSVEIENPETSDQ

SEQ ID NO: 849 - protein, 616 aa, Artificial Sequence
  source: /note="Description of Artificial Sequence: Synthetic polypeptide"
MSRSVALAVLALLSLSGLEAYMLDLQPETGGGGSGGGGSGGGGSIQRTPKIQVYSRHPAENGKSNFLNCYVSGFHPSDIEVDLLKNGERIEKVEHSDLSFSKDWSFYLLYYTEFTPTEKDEYACRVNHVTLSQPKIVKWDRDMGGGGSGGGGSGGGGSGGGGSGSHSMRYFFTSVSRPGRGEPRFIAVGYVDDTQFVRFDSDAASQRMEPRAPWIEQEGPEYWDGETRKVKAHSQTHRVDLGTLRGAYNQSEAGSHTVQRMYGCDVGSDWRFLRGYHQYAYDGKDYIALKEDLRSWTAADMAAQTTKHKWEAAHVAEQLRAYLEGTCVEWLRRYLENGKETLQRTDAPKTHMTHHAVSDHEATLRCWALSFYPAEITLTWQRDGEDQTQDTELVETRPAGDGTFQKWAAVVVPSGQEQRYTCHVQHEGLPKPLTLRWEPSSQPTIPIGSGSGSGSEDGSGSGSGSLSTTEVAMHTSTSSSVTKSYISSQTNDTHKRDTYAATPRAHEVSEISVRTVYPPEEETGERVQLAHHFSEPEITLIIFGVMAGVIGTILLISYGIRRLIKKSPSDVKPLPSPDTDVPLSSVEIENPETSDQGSGEGRGSLLTCGDVEENPG

SEQ ID NO: 850 - protein, 382 aa, Artificial Sequence
  source: /note="Description of Artificial Sequence: Synthetic polypeptide"
PMYGKIIFVLLLSEIVSISAACPWAVSGARASPGSAASPRLREGPELSPDDPAGLLDLRQGMFAQLVAQNVLLIDGPLSWYSDPGLAGVSLTGGLSYKEDTKELVVAKAGVYYVFFQLELRRVVAGEGSGSVSLALHLQPLRSAAGAAALALTVDLPPASSEARNSAFGFQGRLLHLSAGQRLGVHLHTEARARHAWQLTQGATVLGLFRVTPEIPAGLPSPRSEGGSGGSGGGPEDEPGSGSGGGSGGGSLSTTEVAMHTSTSSSVTKSYISSQTNDTHKRDTYAATPRAHEVSEISVRTVYPPEEETGERVQLAHHFSEPEITLIIFGVMAGVIGTILLISYGIRRLIKKSPSDVKPLPSPDTDVPLSSVEIENPETSDQ

SEQ ID NO: 851 - protein, 205 aa, Artificial Sequence
  source: /note="Description of Artificial Sequence: Synthetic polypeptide"
ACPWAVSGARASPGSAASPRLREGPELSPDDPAGLLDLRQGMFAQLVAQNVLLIDGPLSWYSDPGLAGVSLTGGLSYKEDTKELVVAKAGVYYVFFQLELRRVVAGEGSGSVSLALHLQPLRSAAGAAALALTVDLPPASSEARNSAFGFQGRLLHLSAGQRLGVHLHTEARARHAWQLTQGATVLGLFRVTPEIPAGLPSPRSE

SEQ ID NO: 852 - protein, 26 aa, Artificial Sequence
  source: /note="Description of Artificial Sequence: Synthetic peptide"
GGSGGSGGGPEDEPGSGSGGGSGGGS

SEQ ID NO: 853 - protein, 21 aa, Thosea asigna virus
GSGEGRGSLLTCGDVEENPGP

SEQ ID NO: 854 - protein, 998 aa, Artificial Sequence
  source: /note="Description of Artificial Sequence: Synthetic polypeptide"
MYGKIIFVLLLSEIVSISAACPWAVSGARASPGSAASPRLREGPELSPDDPAGLLDLRQGMFAQLVAQNVLLIDGPLSWYSDPGLAGVSLTGGLSYKEDTKELVVAKAGVYYVFFQLELRRVVAGEGSGSVSLALHLQPLRSAAGAAALALTVDLPPASSEARNSAFGFQGRLLHLSAGQRLGVHLHTEARARHAWQLTQGATVLGLFRVTPEIPAGLPSPRSEGGSGGSGGGPEDEPGSGSGGGSGGGSLSTTEVAMHTSTSSSVTKSYISSQTNDTHKRDTYAATPRAHEVSEISVRTVYPPEEETGERVQLAHHFSEPEITLIIFGVMAGVIGTILLISYGIRRLIKKSPSDVKPLPSPDTDVPLSSVEIENPETSDQGSGEGRGSLLTCGDVEENPGPMSRSVALAVLALLSLSGLEAYMLDLQPETGGGGSGGGGSGGGGSIQRTPKIQVYSRHPAENGKSNFLNCYVSGFHPSDIEVDLLKNGERIEKVEHSDLSFSKDWSFYLLYYTEFTPTEKDEYACRVNHVTLSQPKIVKWDRDMGGGGSGGGGSGGGGSGGGGSGSHSMRYFFTSVSRPGRGEPRFIAVGYVDDTQFVRFDSDAASQRMEPRAPWIEQEGPEYWDGETRKVKAHSQTHRVDLGTLRGAYNQSEAGSHTVQRMYGCDVGSDWRFLRGYHQYAYDGKDYIALKEDLRSWTAADMAAQTTKHKWEAAHVAEQLRAYLEGTCVEWLRRYLENGKETLQRTDAPKTHMTHHAVSDHEATLRCWALSFYPAEITLTWQRDGEDQTQDTELVETRPAGDGTFQKWAAVVVPSGQEQRYTCHVQHEGLPKPLTLRWEPSSQPTIPIGSGSGSGSEDGSGSGSGSLSTTEVAMHTSTSSSVTKSYISSQTNDTHKRDTYAATPRAHEVSEISVRTVYPPEEETGERVQLAHHFSEPEITLIIFGVMAGVIGTILLISYGIRRLIKKSPSDVKPLPSPDTDVPLSSVEIENPETSDQ

SEQ ID NO: 855 - protein, 401 aa, Artificial Sequence
  source: /note="Description of Artificial Sequence: Synthetic polypeptide"
MYGKIIFVLLLSEIVSISAACPWAVSGARASPGSAASPRLREGPELSPDDPAGLLDLRQGMFAQLVAQNVLLIDGPLSWYSDPGLAGVSLTGGLSYKEDTKELVVAKAGVYYVFFQLELRRVVAGEGSGSVSLALHLQPLRSAAGAAALALTVDLPPASSEARNSAFGFQGRLLHLSAGQRLGVHLHTEARARHAWQLTQGATVLGLFRVTPEIPAGLPSPRSEGGSGGSGGGPEDEPGSGSGGGSGGGSLSTTEVAMHTSTSSSVTKSYISSQTNDTHKRDTYAATPRAHEVSEISVRTVYPPEEETGERVQLAHHFSEPEITLIIFGVMAGVIGTILLISYGIRRLIKKSPSDVKPLPSPDTDVPLSSVEIENPETSDQGSGEGRGSLLTCGDVEENPG

SEQ ID NO: 856 - protein, 597 aa, Artificial Sequence
  source: /note="Description of Artificial Sequence: Synthetic polypeptide"
PMSRSVALAVLALLSLSGLEAYMLDLQPETGGGGSGGGGSGGGGSIQRTPKIQVYSRHPAENGKSNFLNCYVSGFHPSDIEVDLLKNGERIEKVEHSDLSFSKDWSFYLLYYTEFTPTEKDEYACRVNHVTLSQPKIVKWDRDMGGGGSGGGGSGGGGSGGGGSGSHSMRYFFTSVSRPGRGEPRFIAVGYVDDTQFVRFDSDAASQRMEPRAPWIEQEGPEYWDGETRKVKAHSQTHRVDLGTLRGAYNQSEAGSHTVQRMYGCDVGSDWRFLRGYHQYAYDGKDYIALKEDLRSWTAADMAAQTTKHKWEAAHVAEQLRAYLEGTCVEWLRRYLENGKETLQRTDAPKTHMTHHAVSDHEATLRCWALSFYPAEITLTWQRDGEDQTQDTELVETRPAGDGTFQKWAAVVVPSGQEQRYTCHVQHEGLPKPLTLRWEPSSQPTIPIGSGSGSGSEDGSGSGSGSLSTTEVAMHTSTSSSVTKSYISSQTNDTHKRDTYAATPRAHEVSEISVRTVYPPEEETGERVQLAHHFSEPEITLIIFGVMAGVIGTILLISYGIRRLIKKSPSDVKPLPSPDTDVPLSSVEIENPETSDQ

SEQ ID NO: 857 - protein, 876 aa, Artificial Sequence
  source: /note="Description of Artificial Sequence: Synthetic polypeptide"
MSRSVALAVLALLSLSGLEAYMLDLQPETGGGGSGGGGSGGGGSIQRTPKIQVYSRHPAENGKSNFLNCYVSGFHPSDIEVDLLKNGERIEKVEHSDLSFSKDWSFYLLYYTEFTPTEKDEYACRVNHVTLSQPKIVKWDRDMGGGGSGGGGSGGGGSGGGGSGSHSMRYFFTSVSRPGRGEPRFIAVGYVDDTQFVRFDSDAASQRMEPRAPWIEQEGPEYWDGETRKVKAHSQTHRVDLGTLRGAYNQSEAGSHTVQRMYGCDVGSDWRFLRGYHQYAYDGKDYIALKEDLRSWTAADMAAQTTKHKWEAAHVAEQLRAYLEGTCVEWLRRYLENGKETLQRTDAPKTHMTHHAVSDHEATLRCWALSFYPAEITLTWQRDGEDQTQDTELVETRPAGDGTFQKWAAVVVPSGQEQRYTCHVQHEGLPKPLTLRWEPSSQPTIPIGSGSGSGSEDGSGSGSGSLSTTEVAMHTSTSSSVTKSYISSQTNDTHKRDTYAATPRAHEVSEISVRTVYPPEEETGERVQLAHHFSEPEITLIIFGVMAGVIGTILLISYGIRRLIKKSPSDVKPLPSPDTDVPLSSVEIENPETSDQSGRGGGGSGGGGSGGGGSGGGGSSPAMEYASDASLDPEAPWPPAPRARACRVLPWALVAGLLLLLLLAAACAVFLACPWAVSGARASPGSAASPRLREGPELSPDDPAGLLDLRQGMFAQLVAQNVLLIDGPLSWYSDPGLAGVSLTGGLSYKEDTKELVVAKAGVYYVFFQLELRRVVAGEGSGSVSLALHLQPLRSAAGAAALALTVDLPPASSEARNSAFGFQGRLLHLSAGQRLGVHLHTEARARHAWQLTQGATVLGLFRVTPEIPAGLPSPRSE

SEQ ID NO: 858 - protein, 254 aa, Artificial Sequence
  source: /note="Description of Artificial Sequence: Synthetic polypeptide"
MEYASDASLDPEAPWPPAPRARACRVLPWALVAGLLLLLLLAAACAVFLACPWAVSGARASPGSAASPRLREGPELSPDDPAGLLDLRQGMFAQLVAQNVLLIDGPLSWYSDPGLAGVSLTGGLSYKEDTKELVVAKAGVYYVFFQLELRRVVAGEGSGSVSLALHLQPLRSAAGAAALALTVDLPPASSEARNSAFGFQGRLLHLSAGQRLGVHLHTEARARHAWQLTQGATVLGLFRVTPEIPAGLPSPRSE

SEQ ID NO: 859 - protein, 883 aa, Artificial Sequence
  source: /note="Description of Artificial Sequence: Synthetic polypeptide"
MSRSVALAVLALLSLSGLEAYMLDLQPETGGGGSGGGGSGGGGSIQRTPKIQVYSRHPAENGKSNFLNCYVSGFHPSDIEVDLLKNGERIEKVEHSDLSFSKDWSFYLLYYTEFTPTEKDEYACRVNHVTLSQPKIVKWDRDMGGGGSGGGGSGGGGSGGGGSGSHSMRYFFTSVSRPGRGEPRFIAVGYVDDTQFVRFDSDAASQRMEPRAPWIEQEGPEYWDGETRKVKAHSQTHRVDLGTLRGAYNQSEAGSHTVQRMYGCDVGSDWRFLRGYHQYAYDGKDYIALKEDLRSWTAADMAAQTTKHKWEAAHVAEQLRAYLEGTCVEWLRRYLENGKETLQRTDAPKTHMTHHAVSDHEATLRCWALSFYPAEITLTWQRDGEDQTQDTELVETRPAGDGTFQKWAAVVVPSGQEQRYTCHVQHEGLPKPLTLRWEPSSQPTIPIGSGSGSGSEDGSGSGSGSLSTTEVAMHTSTSSSVTKSYISSQTNDTHKRDTYAATPRAHEVSEISVRTVYPPEEETGERVQLAHHFSEPEITLIIFGVMAGVIGTILLISYGIRRLIKKSPSDVKPLPSPDTDVPLSSVEIENPETSDQSGRGASSGSSGSGSQKKPRYEIRWKVVVISAILALVVLTVISLIILIMLWGSGMQSPAGGSGGSGGGGGSGGGSGGGSGGGSACPWAVSGARASPGSAASPRLREGPELSPDDPAGLLDLRQGMFAQLVAQNVLLIDGPLSWYSDPGLAGVSLTGGLSYKEDTKELVVAKAGVYYVFFQLELRRVVAGEGSGSVSLALHLQPLRSAAGAAALALTVDLPPASSEARNSAFGFQGRLLHLSAGQRLGVHLHTEARARHAWQLTQGATVLGLFRVTPEIPAGLPSPRSE

SEQ ID NO: 860 - protein, 1231 aa, Artificial Sequence
  source: /note="Description of Artificial Sequence: Synthetic polypeptide"
MSRSVALAVLALLSLSGLEAYMLDLQPETGGGGSGGGGSGGGGSIQRTPKIQVYSRHPAENGKSNFLNCYVSGFHPSDIEVDLLKNGERIEKVEHSDLSFSKDWSFYLLYYTEFTPTEKDEYACRVNHVTLSQPKIVKWDRDMGGGGSGGGGSGGGGSGGGGSGSHSMRYFFTSVSRPGRGEPRFIAVGYVDDTQFVRFDSDAASQRMEPRAPWIEQEGPEYWDGETRKVKAHSQTHRVDLGTLRGAYNQSEAGSHTVQRMYGCDVGSDWRFLRGYHQYAYDGKDYIALKEDLRSWTAADMAAQTTKHKWEAAHVAEQLRAYLEGTCVEWLRRYLENGKETLQRTDAPKTHMTHHAVSDHEATLRCWALSFYPAEITLTWQRDGEDQTQDTELVETRPAGDGTFQKWAAVVVPSGQEQRYTCHVQHEGLPKPLTLRWEPSSQPTIPIGSGSGSGSEDGSGSGSGSLSTTEVAMHTSTSSSVTKSYISSQTNDTHKRDTYAATPRAHEVSEISVRTVYPPEEETGERVQLAHHFSEPEITLIIFGVMAGVIGTILLISYGIRRLIKKSPSDVKPLPSPDTDVPLSSVEIENPETSDQGGGGSGGGGSGGGGSGGGGSGGGGMQPQESHVHYSRWEDGSRDGVSLGAVSSTEEASRCRRISQRLCTGKLGIAMKVLGGVALFWIIFILGYLTGYYVHKCKGGGGSGGGGSGGGGSIWELKKDVYVVELDWYPDAPGEMVVLTCDTPEEDGITWTLDQSSEVLGSGKTLTIQVKEFGDAGQYTCHKGGEVLSHSLLLLHKKEDGIWSTDILKDQKEPKNKTFLRCEAKNYSGRFTCWWLTTISTDLTFSVKSSRGSSDPQGVTCGAATLSAERVRGDNKEYEYSVECQEDSACPAAEESLPIEVMVDAVHKLKYENYTSSFFIRDIIKPDPPKNLQLKPLKNSRQVEVSWEYPDTWSTPHSYFSLTFCVQVQGKSKREKKDRVFTDKTSATVICRKNASISVRAQDRYYSSSWSEWASVPCSGGGGSGGGGSGGGGSRNLPVATPDPGMFPCLHHSQNLLRAVSNMLQKARQTLEFYPCTSEEIDHEDITKDKTSTVEACLPLELTKNESCLNSRETSFITNGSCLASRKTSFMMALCLSSIYEDLKMYQVEFKTMNAKLLMDPKRQIFLDQNMLAVIDELMQALNFNSETVPQKSSLEEPDFYKTKIKLCILLHAFRIRAVTIDRVMSYLNAS

SEQ ID NO: 861 - protein, 306 aa, Artificial Sequence
  source: /note="Description of Artificial Sequence: Synthetic polypeptide"
IWELKKDVYVVELDWYPDAPGEMVVLTCDTPEEDGITWTLDQSSEVLGSGKTLTIQVKEFGDAGQYTCHKGGEVLSHSLLLLHKKEDGIWSTDILKDQKEPKNKTFLRCEAKNYSGRFTCWWLTTISTDLTFSVKSSRGSSDPQGVTCGAATLSAERVRGDNKEYEYSVECQEDSACPAAEESLPIEVMVDAVHKLKYENYTSSFFIRDIIKPDPPKNLQLKPLKNSRQVEVSWEYPDTWSTPHSYFSLTFCVQVQGKSKREKKDRVFTDKTSATVICRKNASISVRAQDRYYSSSWSEWASVPCS

SEQ ID NO: 862 - protein, 197 aa, Artificial Sequence
  source: /note="Description of Artificial Sequence: Synthetic polypeptide"
RNLPVATPDPGMFPCLHHSQNLLRAVSNMLQKARQTLEFYPCTSEEIDHEDITKDKTSTVEACLPLELTKNESCLNSRETSFITNGSCLASRKTSFMMALCLSSIYEDLKMYQVEFKTMNAKLLMDPKRQIFLDQNMLAVIDELMQALNFNSETVPQKSSLEEPDFYKTKIKLCILLHAFRIRAVTIDRVMSYLNAS

SEQ ID NO: 863 - protein, 1265 aa, Artificial Sequence
  source: /note="Description of Artificial Sequence: Synthetic polypeptide"
MSRSVALAVLALLSLSGLEAYMLDLQPETGGGGSGGGGSGGGGSIQRTPKIQVYSRHPAENGKSNFLNCYVSGFHPSDIEVDLLKNGERIEKVEHSDLSFSKDWSFYLLYYTEFTPTEKDEYACRVNHVTLSQPKIVKWDRDMGGGGSGGGGSGGGGSGGGGSGSHSMRYFFTSVSRPGRGEPRFIAVGYVDDTQFVRFDSDAASQRMEPRAPWIEQEGPEYWDGETRKVKAHSQTHRVDLGTLRGAYNQSEAGSHTVQRMYGCDVGSDWRFLRGYHQYAYDGKDYIALKEDLRSWTAADMAAQTTKHKWEAAHVAEQLRAYLEGTCVEWLRRYLENGKETLQRTDAPKTHMTHHAVSDHEATLRCWALSFYPAEITLTWQRDGEDQTQDTELVETRPAGDGTFQKWAAVVVPSGQEQRYTCHVQHEGLPKPLTLRWEPSSQPTIPIGSGSGSGSEDGSGSGSGSLSTTEVAMHTSTSSSVTKSYISSQTNDTHKRDTYAATPRAHEVSEISVRTVYPPEEETGERVQLAHHFSEPEITLIIFGVMAGVIGTILLISYGIRRLIKKSPSDVKPLPSPDTDVPLSSVEIENPETSDQSGRGASSGSSGSGSQKKPRYEIRWKVVVISAILALVVLTVISLIILIMLWGSGMQSPAMQPQESHVHYSRWEDGSRDGVSLGAVSSTEEASRCRRISQRLCTGKLGIAMKVLGGVALFWIIFILGYLTGYYVHKCKGGGGSGGGGSGGGGSIWELKKDVYVVELDWYPDAPGEMVVLTCDTPEEDGITWTLDQSSEVLGSGKTLTIQVKEFGDAGQYTCHKGGEVLSHSLLLLHKKEDGIWSTDILKDQKEPKNKTFLRCEAKNYSGRFTCWWLTTISTDLTFSVKSSRGSSDPQGVTCGAATLSAERVRGDNKEYEYSVECQEDSACPAAEESLPIEVMVDAVHKLKYENYTSSFFIRDIIKPDPPKNLQLKPLKNSRQVEVSWEYPDTWSTPHSYFSLTFCVQVQGKSKREKKDRVFTDKTSATVICRKNASISVRAQDRYYSSSWSEWASVPCSGGGGSGGGGSGGGGSRNLPVATPDPGMFPCLHHSQNLLRAVSNMLQKARQTLEFYPCTSEEIDHEDITKDKTSTVEACLPLELTKNESCLNSRETSFITNGSCLASRKTSFMMALCLSSIYEDLKMYQVEFKTMNAKLLMDPKRQIFLDQNMLAVIDELMQALNFNSETVPQKSSLEEPDFYKTKIKLCILLHAFRIRAVTIDRVMSYLNAS

SEQ ID NO: 864 - protein, 1187 aa, Artificial Sequence
  source: /note="Description of Artificial Sequence: Synthetic polypeptide"
MSRSVALAVLALLSLSGLEAYMLDLQPETGGGGSGGGGSGGGGSIQRTPKIQVYSRHPAENGKSNFLNCYVSGFHPSDIEVDLLKNGERIEKVEHSDLSFSKDWSFYLLYYTEFTPTEKDEYACRVNHVTLSQPKIVKWDRDMGGGGSGGGGSGGGGSGGGGSGSHSMRYFFTSVSRPGRGEPRFIAVGYVDDTQFVRFDSDAASQRMEPRAPWIEQEGPEYWDGETRKVKAHSQTHRVDLGTLRGAYNQSEAGSHTVQRMYGCDVGSDWRFLRGYHQYAYDGKDYIALKEDLRSWTAADMAAQTTKHKWEAAHVAEQLRAYLEGTCVEWLRRYLENGKETLQRTDAPKTHMTHHAVSDHEATLRCWALSFYPAEITLTWQRDGEDQTQDTELVETRPAGDGTFQKWAAVVVPSGQEQRYTCHVQHEGLPKPLTLRWEPSSQPTIPIGSGSGSGSEDGSGSGSGSLSTTEVAMHTSTSSSVTKSYISSQTNDTHKRDTYAATPRAHEVSEISVRTVYPPEEETGERVQLAHHFSEPEITLIIFGVMAGVIGTILLISYGIRRLIKKSPSDVKPLPSPDTDVPLSSVEIENPETSDQSGRGASSGSSGSGSQKKPRYEIRWKVVVISAILALVVLTVISLIILIMLWGSGMQSPAGGGGSGGGGSGGGGSIWELKKDVYVVELDWYPDAPGEMVVLTCDTPEEDGITWTLDQSSEVLGSGKTLTIQVKEFGDAGQYTCHKGGEVLSHSLLLLHKKEDGIWSTDILKDQKEPKNKTFLRCEAKNYSGRFTCWWLTTISTDLTFSVKSSRGSSDPQGVTCGAATLSAERVRGDNKEYEYSVECQEDSACPAAEESLPIEVMVDAVHKLKYENYTSSFFIRDIIKPDPPKNLQLKPLKNSRQVEVSWEYPDTWSTPHSYFSLTFCVQVQGKSKREKKDRVFTDKTSATVICRKNASISVRAQDRYYSSSWSEWASVPCSGGGGSGGGGSGGGGSRNLPVATPDPGMFPCLHHSQNLLRAVSNMLQKARQTLEFYPCTSEEIDHEDITKDKTSTVEACLPLELTKNESCLNSRETSFITNGSCLASRKTSFMMALCLSSIYEDLKMYQVEFKTMNAKLLMDPKRQIFLDQNMLAVIDELMQALNFNSETVPQKSSLEEPDFYKTKIKLCILLHAFRIRAVTIDRVMSYLNAS

SEQ ID NO: 865 - protein, 943 aa, Artificial Sequence
  source: /note="Description of Artificial Sequence: Synthetic polypeptide"
MSRSVALAVLALLSLSGLEAYMLDLQPETGGGGSGGGGSGGGGSIQRTPKIQVYSRHPAENGKSNFLNCYVSGFHPSDIEVDLLKNGERIEKVEHSDLSFSKDWSFYLLYYTEFTPTEKDEYACRVNHVTLSQPKIVKWDRDMGGGGSGGGGSGGGGSGGGGSGSHSMRYFFTSVSRPGRGEPRFIAVGYVDDTQFVRFDSDAASQRMEPRAPWIEQEGPEYWDGETRKVKAHSQTHRVDLGTLRGAYNQSEAGSHTVQRMYGCDVGSDWRFLRGYHQYAYDGKDYIALKEDLRSWTAADMAAQTTKHKWEAAHVAEQLRAYLEGTCVEWLRRYLENGKETLQRTDAPKTHMTHHAVSDHEATLRCWALSFYPAEITLTWQRDGEDQTQDTELVETRPAGDGTFQKWAAVVVPSGQEQRYTCHVQHEGLPKPLTLRWEPSSQPTIPIGSGSGSGSEDGSGSGSGSLSTTEVAMHTSTSSSVTKSYISSQTNDTHKRDTYAATPRAHEVSEISVRTVYPPEEETGERVQLAHHFSEPEITLIIFGVMAGVIGTILLISYGIRRLIKKSPSDVKPLPSPDTDVPLSSVEIENPETSDQGSGEGRGSLLTCGDVEENPGPMYGKIIFVLLLSEIVSISADCDIEGKDGKQYESVLMVSIDQLLDSMKEIGSNCLNNEFNFFKRHICDANKEGMFLFRAARKLRQFLKMNSTGDFDLHLLKVSEGTTILLNCTGQVKGRKPAALGEAQPTKSLEENKSLKEQKKLNDLCFLKRLLQEIKTCWNKILMGTKEHGGSGGSGGGGGSGGGSGGGSGGGSLSTTEVAMHTSTSSSVTKSYISSQTNDTHKRDTYAATPRAHEVSEISVRTVYPPEEETGERVQLAHHFSEPEITLIIFGVMAGVIGTILLISYGIRRLIKKSPSDVKPLPSPDTDVPLSSVEIENPETSDQ

SEQ ID NO: 866 - protein, 327 aa, Artificial Sequence
  source: /note="Description of Artificial Sequence: Synthetic polypeptide"
PMYGKIIFVLLLSEIVSISADCDIEGKDGKQYESVLMVSIDQLLDSMKEIGSNCLNNEFNFFKRHICDANKEGMFLFRAARKLRQFLKMNSTGDFDLHLLKVSEGTTILLNCTGQVKGRKPAALGEAQPTKSLEENKSLKEQKKLNDLCFLKRLLQEIKTCWNKILMGTKEHGGSGGSGGGGGSGGGSGGGSGGGSLSTTEVAMHTSTSSSVTKSYISSQTNDTHKRDTYAATPRAHEVSEISVRTVYPPEEETGERVQLAHHFSEPEITLIIFGVMAGVIGTILLISYGIRRLIKKSPSDVKPLPSPDTDVPLSSVEIENPETSDQ

SEQ ID NO: 867 - protein, 152 aa, Artificial Sequence
  source: /note="Description of Artificial Sequence: Synthetic polypeptide"
DCDIEGKDGKQYESVLMVSIDQLLDSMKEIGSNCLNNEFNFFKRHICDANKEGMFLFRAARKLRQFLKMNSTGDFDLHLLKVSEGTTILLNCTGQVKGRKPAALGEAQPTKSLEENKSLKEQKKLNDLCFLKRLLQEIKTCWNKILMGTKEH

SEQ ID NO: 868 - protein, 1095 aa, Artificial Sequence
  source: /note="Description of Artificial Sequence: Synthetic polypeptide"
MSRSVALAVLALLSLSGLEAYMLDLQPETGGGGSGGGGSGGGGSIQRTPKIQVYSRHPAENGKSNFLNCYVSGFHPSDIEVDLLKNGERIEKVEHSDLSFSKDWSFYLLYYTEFTPTEKDEYACRVNHVTLSQPKIVKWDRDMGGGGSGGGGSGGGGSGGGGSGSHSMRYFFTSVSRPGRGEPRFIAVGYVDDTQFVRFDSDAASQRMEPRAPWIEQEGPEYWDGETRKVKAHSQTHRVDLGTLRGAYNQSEAGSHTVQRMYGCDVGSDWRFLRGYHQYAYDGKDYIALKEDLRSWTAADMAAQTTKHKWEAAHVAEQLRAYLEGTCVEWLRRYLENGKETLQRTDAPKTHMTHHAVSDHEATLRCWALSFYPAEITLTWQRDGEDQTQDTELVETRPAGDGTFQKWAAVVVPSGQEQRYTCHVQHEGLPKPLTLRWEPSSQPTIPIGSGSGSGSEDGSGSGSGSLSTTEVAMHTSTSSSVTKSYISSQTNDTHKRDTYAATPRAHEVSEISVRTVYPPEEETGERVQLAHHFSEPEITLIIFGVMAGVIGTILLISYGIRRLIKKSPSDVKPLPSPDTDVPLSSVEIENPETSDQGSGEGRGSLLTCGDVEENPGPMYGKIIFVLLLSEIVSISANWVNVISDLKKIEDLIQSMHIDATLYTESDVHPSCKVTAMKCFLLELQVISLESGDASIHDTVENLIILANNSLSSNGNVTESGCKECEELEEKNIKEFLQSFVHIVQMFINTSGGGGSGGGGSGGGGSITCPPPMSVEHADIWVKSYSLYSRERYICNSGFKRKAGTSSLTECVLNKATNVAHWTTPSLKCIRDPALVHQRPAPPSTVTTAGVTPQPESLSPSGKEPAASSPSSNNTAATTAAIVPGSQLMPSKSPSTGTTEISSHESSHGTPSQTTAKNWELTASASHQPPGVYPQGHSDTTGGSGGSGGGGGSGGGSGGGSGGGSLSTTEVAMHTSTSSSVTKSYISSQTNDTHKRDTYAATPRAHEVSEISVRTVYPPEEETGERVQLAHHFSEPEITLIIFGVMAGVIGTILLISYGIRRLIKKSPSDVKPLPSPDTDVPLSSVEIENPETSDQ

SEQ ID NO: 869 - protein, 479 aa, Artificial Sequence
  source: /note="Description of Artificial Sequence: Synthetic polypeptide"
PMYGKIIFVLLLSEIVSISANWVNVISDLKKIEDLIQSMHIDATLYTESDVHPSCKVTAMKCFLLELQVISLESGDASIHDTVENLIILANNSLSSNGNVTESGCKECEELEEKNIKEFLQSFVHIVQMFINTSGGGGSGGGGSGGGGSITCPPPMSVEHADIWVKSYSLYSRERYICNSGFKRKAGTSSLTECVLNKATNVAHWTTPSLKCIRDPALVHQRPAPPSTVTTAGVTPQPESLSPSGKEPAASSPSSNNTAATTAAIVPGSQLMPSKSPSTGTTEISSHESSHGTPSQTTAKNWELTASASHQPPGVYPQGHSDTTGGSGGSGGGGGSGGGSGGGSGGGSLSTTEVAMHTSTSSSVTKSYISSQTNDTHKRDTYAATPRAHEVSEISVRTVYPPEEETGERVQLAHHFSEPEITLIIFGVMAGVIGTILLISYGIRRLIKKSPSDVKPLPSPDTDVPLSSVEIENPETSDQ

SEQ ID NO: 870 - protein, 114 aa, Artificial Sequence
  source: /note="Description of Artificial Sequence: Synthetic polypeptide"
NWVNVISDLKKIEDLIQSMHIDATLYTESDVHPSCKVTAMKCFLLELQVISLESGDASIHDTVENLIILANNSLSSNGNVTESGCKECEELEEKNIKEFLQSFVHIVQMFINTS

SEQ ID NO: 871 - protein, 175 aa, Artificial Sequence
  source: /note="Description of Artificial Sequence: Synthetic polypeptide"
ITCPPPMSVEHADIWVKSYSLYSRERYICNSGFKRKAGTSSLTECVLNKATNVAHWTTPSLKCIRDPALVHQRPAPPSTVTTAGVTPQPESLSPSGKEPAASSPSSNNTAATTAAIVPGSQLMPSKSPSTGTTEISSHESSHGTPSQTTAKNWELTASASHQPPGVYPQGHSDTT

SEQ ID NO: 872 - protein, 1228 aa, Artificial Sequence
  source: /note="Description of Artificial Sequence: Synthetic polypeptide"
MSRSVALAVLALLSLSGLEAYMLDLQPETGGGGSGGGGSGGGGSIQRTPKIQVYSRHPAENGKSNFLNCYVSGFHPSDIEVDLLKNGERIEKVEHSDLSFSKDWSFYLLYYTEFTPTEKDEYACRVNHVTLSQPKIVKWDRDMGGGGSGGGGSGGGGSGGGGSGSHSMRYFFTSVSRPGRGEPRFIAVGYVDDTQFVRFDSDAASQRMEPRAPWIEQEGPEYWDGETRKVKAHSQTHRVDLGTLRGAYNQSEAGSHTVQRMYGCDVGSDWRFLRGYHQYAYDGKDYIALKEDLRSWTAADMAAQTTKHKWEAAHVAEQLRAYLEGTCVEWLRRYLENGKETLQRTDAPKTHMTHHAVSDHEATLRCWALSFYPAEITLTWQRDGEDQTQDTELVETRPAGDGTFQKWAAVVVPSGQEQRYTCHVQHEGLPKPLTLRWEPSSQPTIPIGSGSGSGSEDGSGSGSGSLSTTEVAMHTSTSSSVTKSYISSQTNDTHKRDTYAATPRAHEVSEISVRTVYPPEEETGERVQLAHHFSEPEITLIIFGVMAGVIGTILLISYGIRRLIKKSPSDVKPLPSPDTDVPLSSVEIENPETSDQGSGEGRGSLLTCGDVEENPGPMQPQESHVHYSRWEDGSRDGVSLGAVSSTEEASRCRRISQRLCTGKLGIAMKVLGGVALFWIIFILGYLTGYYVHKCKGGGGSGGGGSGGGGSIWELKKDVYVVELDWYPDAPGEMVVLTCDTPEEDGITWTLDQSSEVLGSGKTLTIQVKEFGDAGQYTCHKGGEVLSHSLLLLHKKEDGIWSTDILKDQKEPKNKTFLRCEAKNYSGRFTCWWLTTISTDLTFSVKSSRGSSDPQGVTCGAATLSAERVRGDNKEYEYSVECQEDSACPAAEESLPIEVMVDAVHKLKYENYTSSFFIRDIIKPDPPKNLQLKPLKNSRQVEVSWEYPDTWSTPHSYFSLTFCVQVQGKSKREKKDRVFTDKTSATVICRKNASISVRAQDRYYSSSWSEWASVPCSGGGGSGGGGSGGGGSRNLPVATPDPGMFPCLHHSQNLLRAVSNMLQKARQTLEFYPCTSEEIDHEDITKDKTSTVEACLPLELTKNESCLNSRETSFITNGSCLASRKTSFMMALCLSSIYEDLKMYQVEFKTMNAKLLMDPKRQIFLDQNMLAVIDELMQALNFNSETVPQKSSLEEPDFYKTKIKLCILLHAFRIRAVTIDRVMSYLNAS

SEQ ID NO: 873 - protein, 612 aa, Artificial Sequence
  source: /note="Description of Artificial Sequence: Synthetic polypeptide"
PMQPQESHVHYSRWEDGSRDGVSLGAVSSTEEASRCRRISQRLCTGKLGIAMKVLGGVALFWIIFILGYLTGYYVHKCKGGGGSGGGGSGGGGSIWELKKDVYVVELDWYPDAPGEMVVLTCDTPEEDGITWTLDQSSEVLGSGKTLTIQVKEFGDAGQYTCHKGGEVLSHSLLLLHKKEDGIWSTDILKDQKEPKNKTFLRCEAKNYSGRFTCWWLTTISTDLTFSVKSSRGSSDPQGVTCGAATLSAERVRGDNKEYEYSVECQEDSACPAAEESLPIEVMVDAVHKLKYENYTSSFFIRDIIKPDPPKNLQLKPLKNSRQVEVSWEYPDTWSTPHSYFSLTFCVQVQGKSKREKKDRVFTDKTSATVICRKNASISVRAQDRYYSSSWSEWASVPCSGGGGSGGGGSGGGGSRNLPVATPDPGMFPCLHHSQNLLRAVSNMLQKARQTLEFYPCTSEEIDHEDITKDKTSTVEACLPLELTKNESCLNSRETSFITNGSCLASRKTSFMMALCLSSIYEDLKMYQVEFKTMNAKLLMDPKRQIFLDQNMLAVIDELMQALNFNSETVPQKSSLEEPDFYKTKIKLCILLHAFRIRAVTIDRVMSYLNAS

SEQ ID NO: 874 - protein, 9 aa, Artificial Sequence
  source: /note="Description of Artificial Sequence: Synthetic peptide"
YEMFNDKSF

SEQ ID NO: 875 - protein, 11 aa, Artificial Sequence
  source: /note="Description of Artificial Sequence: Synthetic peptide"
  MOD_RES (3)..(3): Pyro-Lys
  VARIANT (11)..(11): /replace="Leu"
  SITE (1)..(11): /note="Variant residues given in the sequence have no preference with respect to those in the annotations for variant positions"
HRXEIFSHDFI

SEQ ID NO: 876 - protein, 10 aa, Artificial Sequence
  source: /note="Description of Artificial Sequence: Synthetic peptide"
  VARIANT (2)..(2): /replace="Leu"
  VARIANT (5)..(5): /replace="Leu"
  MOD_RES (7)..(7): Pyro-Lys
  SITE (1)..(10): /note="Variant residues given in the sequence have no preference with respect to those in the annotations for variant positions"
FIIEIFXESS

SEQ ID NO: 877 - protein, 10 aa, Artificial Sequence
  source: /note="Description of Artificial Sequence: Synthetic peptide"
  MOD_RES (4)..(4): Pyro-Lys
NEIXREIREI

SEQ ID NO: 878 - protein, 15 aa, Artificial Sequence
  source: /note="Description of Artificial Sequence: Synthetic peptide"
  VARIANT (1)..(1): /replace="Leu"
  VARIANT (11)..(11): /replace="Leu"
  MOD_RES (15)..(15): Selenocysteine
  SITE (1)..(15): /note="Variant residues given in the sequence have no preference with respect to those in the annotations for variant positions"
IFKSIFEMMSIDSSX

SEQ ID NO: 879 - protein, 13 aa, Artificial Sequence
  source: /note="Description of Artificial Sequence: Synthetic peptide"
  MOD_RES (11)..(11): Pyro-Lys
KNFLENFIESXFI

SEQ ID NO: 880 - protein, 11 aa, Artificial Sequence
  source: /note="Description of Artificial Sequence: Synthetic peptide"
KIGDFGLATEK

SEQ ID NO: 881 - protein, 10 aa, Artificial Sequence
  source: /note="Description of Artificial Sequence: Synthetic peptide"
KLVVVGADGV

SEQ ID NO: 882 - protein, 10 aa, Artificial Sequence
  source: /note="Description of Artificial Sequence: Synthetic peptide"
KLVVVGAVGV

SEQ ID NO: 883 - protein, 8 aa, Artificial Sequence
  source: /note="Description of Artificial Sequence: Synthetic peptide"
KLVVVGAV

SEQ ID NO: 884 - protein, 11 aa, Artificial Sequence
  source: /note="Description of Artificial Sequence: Synthetic peptide"
KIGDFGLATEK

SEQ ID NO: 885 - protein, 10 aa, Artificial Sequence
  source: /note="Description of Artificial Sequence: Synthetic peptide"
ARHGGWTTKM

SEQ ID NO: 886 - protein, 10 aa, Artificial Sequence
  source: /note="Description of Artificial Sequence: Synthetic peptide"
ARHGGWTTKM

SEQ ID NO: 887 - protein, 11 aa, Artificial Sequence
  source: /note="Description of Artificial Sequence: Synthetic peptide"
STRDPLSEITK

SEQ ID NO: 888 - protein, 10 aa, Artificial Sequence
  source: /note="Description of Artificial Sequence: Synthetic peptide"
FGLATEKSRW

SEQ ID NO: 889 - protein, 8 aa, Artificial Sequence
  source: /note="Description of Artificial Sequence: Synthetic peptide"
LATEKSRW

SEQ ID NO: 890 - protein, 10 aa, Artificial Sequence
  source: /note="Description of Artificial Sequence: Synthetic peptide"
RMSAPSTGGV

SEQ ID NO: 891 - protein, 9 aa, Unknown
  source: /note="Description of Unknown: HLA-G peptide"
DYLALNEDL

SEQ ID NO: 892 - protein, 9 aa, Unknown
  source: /note="Description of Unknown: HLA-G peptide"
RYLENGKEM

SEQ ID NO: 893 - protein, 10 aa, Unknown
  source: /note="Description of Unknown: HLA-G peptide"
RYAYDGKDYL

SEQ ID NO: 894 - protein, 10 aa, Unknown
  source: /note="Description of Unknown: HLA-G peptide"
AYDGKDYLAL

SEQ ID NO: 895 - protein, 24 aa, Artificial Sequence
  source: /note="Description of Artificial Sequence: Synthetic peptide"
YMLDLQPETGGGGSGGGGSGGGGS
